United States Patent Application Publication US 2026/0097106 A1 - sequence listing, part 5

SEQ ID NO: 14 - DNA, 5186416 bp, Escherichia coli (residues 1,728,807-3,457,612 of 5,186,416)
  source 1..5186416: mol_type = genomic DNA
tttgccgcccccgtagtgtggggaatgatattttctgccgctgcgcgtgaagcacgtaaatctttaccacgtgggccatccaccagtgactgggtgccagtataggcatgaatggtcgtcatcgtgccgacttctatcccgaaactgtcatgcaaggctttggccatcggcgcaagacagttagtggtgcatgacgccacggaaacaatggtgtcgttgccatccagagtgtcgtcattgacgttataaacgatagttttcatttcaccggcaggggcggaaatcaacaccttcttcgcaccagcatcaagatgcgcctgcgatttctcggcggaggtataaaagccagtacattcgacaatgatttctgcacctttcgctttccacggaatatttttagcctctttttcggcgtaaaccgcgatacttttcccatcaacgataagtgaatcttccgtaaaatcaacgctccaggggaatggtccgtagtttgaatcatgtttcagcaggtaggcgagaatttatggggaagtgagatcattaatagcgacaacgtctatgttgcttttgacttcaagtaatcgacccaacaccagtcgaccgatacgaccaaaaccgttaataccaactttactcatggttttctcctgtcaggaacgttcggatgaaaattgatcctttccaggcttagaccaggatggcgggatgggcaatctccattctcacagtgaaacgtaacgtactgaaaacgggtgaacaatatttaatgaaattttgagaaaagcccgttatgttaacggaaaattatgttaaagcaggaaatgttatggaaaataaatattcaaggttacaaatcagcattcactggctggtctttttactggttatcgcagcgtattgcgcaatggagtttcgtggtttcttcccacgtagcgatcggccactcatcaacatgattcatgtttcctgtggcatctcaattctcgtgctgatggtcgttcgtcttttgttaaggctgaaatacccaaccccgccgattatacctaagccaaaaccgatgatgacgggactggcgcatttgggacatttggtgatttatctcctgtttattgcgctgccagtgattggtttggtgatgatgtataaccggggcaacccgtggtttgcgtttggtttgacgatgccttacgcttcagaggccaatttcgaacgggtagatagcttaaagtcgtggcatgaaacgctggcgaatctgggatattttgtcatcgggttgcacgctgcggctgcactggcacaccactatttctggaaggacaacacacttctacgcatgatgccgcgtaaacgttcctgaaggatatttaaagaaaacgcctgtactaaaaccgacccgtggtacaggcgaagaatacgggtctacatcggaagcgcctattatatttatttgtatgacaaataaaaccataatccttgcccatacgtccatctggcttatttttaatcaattcacccgatctttgatctcatcaacggtatcaaaataaaccagcgtataacgttcaaatcgaacataagattcgataaaccatggaggttatatgaaaaaactggcacttattttgtttatgggaacgcttgtttccttttatgccgatgccgggcgcaaaccctgttctggttcgaaaggggggatctcacactgtacggcaggcggcaaatttgtctgtaatgatggttctattagtgcatcgaaaaaaacatgcactaactgaagtgtaaaaggggtgccatgagaaaatgaatctgctagtcaaatgcgcggggaaaatccccgcgcttgcccttacctggacgtgcaggccatgagcgcagcaacctccttatcaccgtcccggaaccgcagttcgtagagcgtttgtcgggtcaggagtgtgaatgtcagaatcgtaatgcagataatgagcagacacaccaccagagggttgtgcttcatagcctttctccttgccggatggcgggtaagaggctaagatctgaattgctaggttcattcgttggcctcagttgatagaaatatcggtcggggccttcgtctttctgattcccggttagcctgaaaacagaaagtctcaggcacccgcaggcatcctatgaggtttccttagggacgaaaataatcacttcacgaaattgcgtgctgttttccagaatttttcgtcattcgggttagccagtttagccattcgttactctcttcattccaatagcattaattttctatgcaataattgttgtaaaaatgtgacgcaaagaggtttttggtcataagtaattaccgtcaagtgccgatgactttctatcaggagtaaacctggacgagagacaacggtaatgaatacaactccctcacagcgattaggttttttgcatcacatcaggttggttccgttatttgcctgcattctaggcggtatcttagttctattcgcattaagttcagccctggctggctatttcctctggcaggccgatcgcgatcagcgtgatgttactgcggagattgagattcggaccgggttagcgaacagttcagattttttgcgttcagcccggatcaatatgattcaggccggggctgcgagtcgtattgcggaaatggaagcaatgaagcgaaatattgcgcaagccgaatcggagattaaacagtcgcagcaaggttatcgtgcttatcagaatcgaccggtgaaaacacctgctgatgaagccctcgacactgaattaaatcaacgctttcaggcttatatcacgggtatgcaacctatgttgaaatatgccaaaaatggcatgtttgaagcgattatcaatcatgaaagtgagcagatccgatcgctggataatgcttataccgatattttgaacaaagccgttaagatacgtagcaccagagccaaccaactggcggaactggcccatcagcgcacccgcctgggtgggatgttcatgattggcgcgtttgtgcttgccctggtcatgacgctgataacatttatggtgctacgtcggatcgtcattcgtccactgcaacatgccgcacaacggattgaaaaaatcgccagtggcgatctgacgatgaatgatgaaccggcgggtcgtaatgaaatcggtcgcttaagtcgtcatttacagcaaatgcagcattcactggggatgacagtagggactgttcgacagggcgcggaagagatttatcgtggcaccagcgaaatttcagctggcaatgcggacctgtcatctcgcaccgaagaacaagcggcggctatcgaacaaactgccgccagcatggagcaactcactgcgacggtgaaacagaatgcggataacgcgcatcatgccagcaaactggcgcaagaggcttctattaaagccagcgatggcgggcagacggtttccggtgtagtaaaaacgatgggcgctatctccacgagttcgaagaaaatttctgagatcaccgccgtcatcaacagtattgctttccagacgaatattctggcactgaatgctgccgttgaagccgcgcgagcgggtgagcaagggcgtggatttgccgttgtcgccagcgaagtacggacactcgcaagtcgcagcgctcaggcggcgaaagagattgaaggcttgatcagtgaatcagtcaggttaattgacctggggtcggatgaggtggcaacggcagggaaaaccatgagcactattgttgatgccgtcgcgagtgtcacacatatcatgcaggaaatcgccgccgcctcggatgaacaaagtagaggcataacgcaggttagccaggcgatttctgaaatagataaggtgacgcaacagaatgcttctctggtagaagaggcctcagcggcggcgttgtcccttgaagaacaggcggcacgattaactgaggcggtggatgtattccgtctgcacaaacattctgtgtcggcaaaacctcgcggagcgggtgaaccagttagtttcgctacggtgtgaaaatgttcaaggagggatcgacagatcccttcacctttcagaacggcattgattttcgaatagcgttaatcatcaactggcaaccagaagagaacgtcgcatctacgcgggtcagtattccaatcggttcgcctgcaccatgtcccggaacaggcagggccaccagcgtggcatgacgcaggtcgtcttttaccgcgccagaagggacaaaccacacgtagtcgtattcaaccgtaagttgacgagatagcgaagcagacagcgtttcgatacaacccgaaggaattttacatccctggctctgcactaatgcatctgaatgctggcgtggcgcagtgccttctggtgatacaacgaccggccattccagcacccggcttagcgttacgttctcctgaagtagcgggtgattagggcggacaaccagcttcaacgattcaagaaacagcagttcgtaattaagcccggtcatcagttcaggatctgacatccgaccaatgccgatatcgatttccccggtttttaaacccgccagaatcatagggttactcattgtcgcaacttgcaaggtcgtctctttttgttgctgatgaaactgacctataaccgaaggtaatatccccagtgccgcagtaggtagtgcaccaaccctgacgacatcattattaagaccttctttacgatgaagcgaccgtccggcagtgttgatggcgtcaagaactctgactgcatgcgttaaaaattgttcgccgggtaaggtaagttgcgccccctgacgaccacgctcaaacaagcgagcgccagtcagctgctccagttcattcaatgtcttagagagcgcaggttgactcaaattaagggtttcagccgcgcgccccaaagttccttgttgtgcgacagctacgaatgtatgaaggtggcgcaaacggatgcgctgactaaacagactatttttttccataagcgatgttaaaaacgaagcggtgtcgctgacaagtgaagttgtttgattatgataacttgattgcaaaatattattaacaattaaagcaattatgttacagcaaaatggataatattgatgttttcgcggcgagatcacagtttgtaaattcttcccgcaagagtgaatgcggttacctacactccagattactgaccactggaggcagacactatggcgaacagcatcacggcggatgagattcgggaacagttttcgcaggcaatgtcagccatgtaccagcaagaagttccgcaatatggcacgctgctggaactggtagctgatgtgaatctggctgtgctggaaaacaatcctcaactgcacgaaaaaatggtaaatgcagacgagctggcgcgactgaatgttgaacgtcatggggcgattcgcgttgggactgcacaagagcttgctactcttcggcggatgtttgccattatggggatgtacccggtgagctattacgatctctcgcaggcaggggtgccggtacattcgacagcatttcggcccattgatgatgcttctctggcgcgtaatcccttccgcgtttttacctccttactccgccttgagcttatcgagaacgaaattttgcgccagaaagcggcggagattctgcgtcagcgcgatatcttcaccccacgttgtcgacaactgttagaggaatatgagcagcagggcggttttaacgaaacacaggcacaggagtttgtgcaggaagccctggaaacgtttcgctggcaccagtcagcaacggtagatgaagaaacctatcgcgcattgcacaacgaacatcggttgattgctgatgtggtctgttttcctggatgccatatcaaccacctgacgccacgtacgctggatattgaccgggtgcagtcgatgatgcctgaatgcggaattgaacccaaaattctcatcgaggggccgccgcgccgcgaggtaccgattttactacgccagaccagctttaaagcactggaagagacggtgttgtttgcggggcagaaacagggcacgcataccgcgcgctttggtgaaattgagcagcgtggcgtggcattaacgccgaaagggcgacaactgtatgatgatcttctgcgtaacgctggaaccgggcaggataatctcactcaccaaatgcatttacaggaaaccttccgcacttttcctgacagtgagtttttaatgcgtcagcaagggttggcatggttccggtaccgtctgacgccttcgggtgaggcgcatcgtcaggcgattcatcctggagacgatccacagcccttaattgaacgtggttgggtagtggcgcaacccatcacctatgaagatttcttgcccgttagcgcggcggggatcttccagtcaaatctgggtaatgaaacgcagacacgcagtcacggtaatgccagtcgcgaagcatttgagcaggcgttgggttgtccggttttggatgagttccagctttaccaggaagcggaagaacgcagtaaacgtcgctgtggtttgctttaaaatctgaccatccgcctttgcaaaaatttgcctgattttacaaacgaatcaggctcatcccatcgacataaaaaaaatgccgatttatgcatattctctcagttcaacaattggattattaataaatattgtctagagtgagcggtcataaataagcactttcttgccgctgaaaacgaccagcgcgggaccattcacaacaccagaaggactcactttcaggtatggatcgtagacgatttattaaaggttcaatggctatggccgccgtgtgcggtaccagcggcattgcttctcttttttctcaggcggcattcgcggcagattctgatattgccgacgggcaaacccagcgttttgacttctccattctacagtcaatggcgcacgacttagcgcaaacagcgtggcgtggtgcgcctcgtccgttacctgacacgctggcgacaatgacgccgcaggcttataacagtattcaatacgacgccgaaaaatcgctctggcataacgttgagaaccgtcaactggacgctcagttcttccatatgggaatgggattccgtcgccgcgttcgtatgttttctgtagatccagcaacacatctggcgcgtgaaattcactttcgcccggagttgttcaaatacaacgatgcaggtgttgatacaaaacaattagaagggcaaagcgatctcggctttgccggttttcgcgtgtttaaagcccccgaactggcgcgccgtgatgtagtatcatttctcggcgcgagttatttccgcgccgttgatgatacatatcaatacggtttgtcggcccgcggcctggcgatcgacacttacaccgacagtaaagaagagttccccgactttaccgccttctggtttgatacggtaaaaccgggggcaactacctttaccgtttatgcgttgctcgatagcgccagcattactggtgcctataagttcactatccattgtgagaaaagtcaggtgattatggatgtggaaaatcacctgtatgcgcgcaaagacattaaacagctgggcattgcgccgatgaccagtatgttcagctgcggtactaatgaacgtcggatgtgcgatacaattcatccgcaaattcatgactctgatcgtctgtccatgtggcggggcaacggcgagtggatttgccgtccgctgaataatccgcaaaaattgcagttcaatgcttacaccgacaacaacccgaaagggtttggtttattgcaactggatcgtgacttctcccattatcaggacattatgggctggtataacaaacgcccaagtctgtgggtggaaccgcgtaacaagtggggtaagggcaccatcggcctgatggaaatcccaacaacgggcgaaacgctggataacattgtctgcttctggcagccagaaaaagctgtaaaagcaggtgatgagtttgcattccagtatcgtctgtactggagtgcgcaaccgcctgttcattgcccattagcgcgcgttatggcgacgcgtaccggcatgggcggtttcccggaaggttgggcgccaggtgaacactatcccgaaaaatgggcgcgtcgttttgccgtcgatttcgttggtggtgatctgaaagctgccgcgccaaaaggcattgagccggtgattacgctttccagtggggaagcgaagcaaatcgaaattctctatattgaacccatcgatggttatcgtattcagtttgactggtatccgacttcggactccactgatccggtcgatatgcggatgtatctacgttgtcagggggacgctatcagtgaaacatggctgtatcagtatttcccgccagcgccggataaacgtcagtatgttgacgaccgcgtgatgagttaatcgttttttcttcggcaccttcttcgggaggtgccgtctggttaaacacgatcccgctcgcatttttccctaagttaaatgagtaatctgatggtgtgtatttcagatacaccttgtcagccactaacagggagtgcgtatgtttccagaataccgagatttaatatcccgtctgaaaaacgaaaatcctcgctttatgtccttgttcgataaacacaataaacttgatcatgaaattgccagaaaggaaggttccgacggtcgagggtacaatgcggaagtggtccgcatgaaaaaacaaaagctacagttaaaagatgagatgctcaaaatcctgcagcaggagagcgtcaaagaggtgtaaactttcctaagccgccagccaggcggcttttttaacaactgcatggattgactggagataagatgactgaaacgataaaagtaagcgaatcacttgaattacatgctgttgcagaaaatcacgtcaaacctctttatcagttaatctgtaaaaataaaacctggttacagcagtcgctaaactggccgcagtttgttcaaagtgaagaggacacgcgaaaaacggtgcagggtaatgtgatgttgcatcaacgcggctatgccaaaatgttcatgattttcaaagaagatgaacttatcggcgttatctcgtttaatcgtattgaaccactgaataaaaccgctgaaataggctactggctggacgaatctcatcaggggcaggggatcatttctcaggcgctgcaggcattgattcatcattacgcccagtctggtgaacttagacgcttcgtgatcaaatgtcgggtggacaatccgcaaagcaaccaggtcgctttgcgcaatggttttatccttgaaggttgcctgaaacaggctgagttcctgaatgatgcctatgatgatgtgaacttatacgcgcgtattatcgattcacaataaccctgccagcggcgttcgcgtaatgcgctcctcgccgttaatgacttttggaccacggacatgaaccgtgtcgccatcaaaggcttcaacgacggcgtggtcggttaactccacatggttttcaattatcaccgcacctgtaatacggctctcaccttgtatgacaacgtgctcgtcgagcagaatcggtccgccacgtaccacggcatttccgccaaccaagacatgatgttttaacacacaattaccttccacaatggcatattccgccacctgcgaactgtaatgaatcgtcggaatggcatcttcttctatgccagctttcacctgcgcgtgaccgtagactttagcgcaatcgcatagccagacattgttctcttcattaccttcaatactggcaaaatcaaaaacttcggcgcgatgttcaataaaagcataccggatgacggcatcgccataaatttgtgcctggtggacaatacgcgaggcgctaacccttgcgcgatcataaatttgtagcaggagttgatggtcaggcgttaagccttgtgctgcgacgatcatagaatgttgattaattaaggcgtgaccaaatattctacattgcccgcaaaccagtgagtcatgaatggtgacgctgtcacttatatatgcaccctggctgatttcactattatcgatccagacattatccgttgcgtaaacctctccccacagtacgctggtgccggtgatgcgcgtattaccggaaatcaccgttccgccgaacgcaatagcattctggtcgtaaatccagcaatttccttcctgtgctaacaccgtttcgcgatcgatccagccgccagcggttcctgctatcacatcgttaaaatcgctaatggcgataatctgccgtaataacacactttttttagtgtcatcttcctgataactaaaggctcgctgttcttcacttagacgatatttgcgcatagcattttcccacaggtgacttactataaccgtagcaaattctgcggctctggctatgctcgagaaaattccataaaatgcatttcaaatatactttataaattaaacaaaatgagtaagaagatgcagagcgataaagtgctcaatttgccggcaggctactttggtattgtgttggggacgatagggatgggatttgcctggcgctatgccagccaggtttggcaggtcagccactggttaggggatgggctggtgattctggcgatgatcatctggggattgttaactagcgcatttattgcccgactcatacgctttccgcatagcgtgctggcggaagttcgccatccagtgctgagcagttttgtgagtttgtttccggcaacgacgatgctggtggcgattggttttgttccgtggtttcgcccactggcggtgtgcctgttcagttttggtgtcgtggttcagttggcttatgccgcctggcaaactgcgggattatggcgcggatctcaccctgaagaagctaccacgcctggactgtatctgccgacagttgccaacaactttatcagcgcaatggcctgtggtgcgttgggctacaccgacgccggtctggtgtttttaggcgcaggcgttttctcatggctaagccttgaacctgtgatcttgcagcgtctgcgcagttcgggagaattacccacggcactgcggacatcactcggcattcagctcgctcctgcgctggtggcctgtagtgcctggcttagcgtcaacggcggcgagggtgacacgctggcgaaaatgcttttcggttatggactgctgcaactgctgtttatgctacgtctgatgccatggtatctctcccagccatttaatgcttcattctggagtttctcgttcggcgtatctgcactggcaaccaccggtttgcatctggggagtggcagcgataatggatttttccatacgctggcggtgccgctgtttatctttaccaattttattattgcaatactgctcatccgtactttggcgcttctgatgcagggaaaattgttagtcagaaccgagcgcgccgttttaatgaaagcagaggacaaagaatgatcattagtgacgaaaattattttactgataaatatgaattaacccgcacacactctgaagtactggaagcggtgaaagtggttaaaccgggtaaaacgctggatctgggctgtggcaatggtcgtaacagtctttacctggcagccaatggttatgatgttgacgcatgggataaaaatgccatgagtatcgccaacgtcgagcgcattaaatccattgaaaatctggataatttacacacccgggtcgttgatctgaataacctcacatttgatggagagtacgattttattctttcgactgtggtgctgatgttccttgaggctaaaaccatccccgggttgattgccaatatgcaacgttgcacgaaacctggcggttacaacctgattgtggcggcgatggataccgctgattatccatgtaccgtcggcttcccgtttgccttcaaagagggagaattacgtcgatattacgaaggctgggagaaggtgaaatacaatgaagacgtcggcgagctgcaccgcaccgacgccaacggtaatcgtattaaactacgtttcgccacgatgctggcacgtaaaaaatgacccggtaagaacaaagcgcgtgaaaattccccacgctgagatagtttactgttcttcttttcggtaagcatattttttatcgaagggatgtgaaattaatcacagtagtcgaagttttttagcagcttaacttactgaaatttaactactgatgattgacttagcccctttttcggcattgactatgtcgtctgaaaaggggctgaaaaatttattttcaccaacactttttttgccacaacacgaagcggcgctttttgctataacttagaaagtaatataatcatctcaggaaactattcatgcgtaccacatcatttgcgaaagttgcagctttatgcggcttattggctctgtctggttgtgcctctaaaatcacccagccagataaatattctggttttttaaacaattactctgatttaaaagaaacaacctcggctacaggtaaacctgttttacgttgggtagacccgagttttgatcaaagcaaatatgacagcatcgtctggaacccaatcacttattatccggtaccgaaaccgtcgacccaggtagggcagaaagttctggataaaattttgaactataccaacaccgaaatgaaagaagcgatagcgcagcgtaaaccactggttaccaccgctgggccgcgtagtctgattttccgtggggccattaccggtgtagataccagcaaagaagggctgcaattctatgaagtggttcctgttgcattagtggttgcggggacgcaaatggctacaggccaccgtaccatggatactcgcctctattttgaaggtgagctgattgatgcagcgactaataaaccggttatcaaagtcgttcgtcagggcgaaggtaaagacctgaataacgaaagtacgccaatggctttcgaaaatattaaacaagttattgatgacatggcgaccgatgccaccatgtttgacgttaacaaaaagtagttccagacgcgccatcgttagatggcgctttttatccggtgcgccgtaaaaccccatccttcagggcggggatataaggcgcggttttccacctgaccaggtgtttgctgttgttcaatgtattggcggatgacggatattggcgcacctccgcagctactggcaaaatagccaggactccacaaaacgcctttgtagtaatacctgactgcaatatctggtcgatctcgtcgcagtcacctacccgatacgcctttgaggctgtttaccagactggatatcgccagtttgggaggatagttaattaacaaatggacgtgatctggttcgccatccatttcaaccagttcagcttcaaaatcagcacatacatttgaaaagtaagtgcgtagtttttctgtcgcgtcatggtcaaaaatctggcgtcggtatctggtgacaaagagcaggtgaacatgcatcaggaaaacacaatgccttccacgccggatatcggtttcttttttcacagaccaaagtatcatttgacctgtgaaacgattacaggcatttaaattccagttaagaccaggtggtcaacaggagtgtgaaatgaggcgcttcgcaggcgcatgtcgtttcgttttcaatcgtgctctggcacgtcagaatgagaatcatgaggccggtaataaatacatcccttacgggaaaatggcttcctggctggttgagtggaaaaatgccactgaaacgcaatggcttaaagattctccctcacagccattgcaacagtcactgaaagaccttgagcgggcttacaaaaacttcttccggaagcgggctgcttttccccgattcaaaaagcggggacagaatgatgcattccgctacccgcagggcgttaagctcgatcaggaaaacagccgtatttttctgccgaaactgggctggatgcgctaccggaacagccgtcaggtcacgggtgttgtgaaaaatgtcactgtcagccagtcctgcggtaagtggtacatcagtattcagacagaaagtgaagtatcaactccggttcacccttcagcatcaatggtcgggctggatgctggcgtggctaaactcgccacgctgtcagatggcacagtctttgagcctgtaaacagttttcagaaaaaccagaagaagctggcgagacttcagcgacagttaagccgcaaggtcaaattcagcaacaactggcaaaagcagaaacgcaaaatacagcgactgcattcctgtatcgcaaatatccgcagggactaccttcacaaagtcacaacggccgtcagcaaaaaccacgcaatgatagtcattgaggatttgaaggtcagcaacatgtcaaagtcagcagcgggtacggtcagccagccggggcgcaatgtccgggcaaaatcaggtttaaaccgttcgatactggatcagggctggtatgaaatgcgccgccagcttgcgtacaagcagctctggcgtggcggtcaggtgcttgctgttccgccagcgtatacaagccagcgttgcgcgtactgtggtcatacagcgaaagagaaccgcctgtcacaaagtaaattcagatgccaggtatgtggatatacagcgaacgccgatgtaaatggcgctcgcaacattttagcggcggggcacgccgttcttgcctgtggagagatggtgcagtcaggccgcccgttgaagcaggaacccaccgaaatgattcaggcgacagcctgaacgtagcagggatccacgtccttcagggcgtggaggatgtcaatatcggtttctgtcagcgattaaattcaacaccacgtaacaaacgcctccggcaattaatccccaaaacgcagaaccaatcccgaccagcgtcaatccacttgccgttaccagaaatgccaccaccgccgcgtctcgctcacgctcattatgcagcgcctgatacaaactgccgccgatggtacttaacagcgccagacctgccagcatctggatccaacttacgggcagggcagccatcatcccggtaatggcactaccaaacagacctgcgagcaaatagaaaatgcctgcaacggcagcggccagccaacgttgatctttatccggatgcgcttccgggctttggcaaatagccgcggtgattgccgcaataccgacggaataaacgccgaaaggggaaaaaaccagtgccagcaatccagtaaatacaattaatggcgaaacaggagccgaatatccagctgctttcattgctgcgatacccggtgcgttttgcgatgccatcgtcaccagaaaaagggggagtgcaacgctcaggctgtgagcaaacgaaaaatcaggggtaatataagtggggagaacgggtttaaagacaacatcagttgtgacaacgtcaccttgcgcgatgacgatcacgatcccaataatcatcgcggcaattaccgcatagcgcggcgcaacggccttggttgccagccataccagcaacatacttccacacaacgtaaattgaccgtccagactggcaaacgcctgtaaaccaaagcgtaataaaatcccggcaagcattgccgccgcaagcgagtgcggaataatgcgcatcagacgagcaaagagtcccgttatgccgcagaggactattagcgcgttggtgacaataaaaacgccgatggcttcgttaagtgttagtccctgcaatccggtgaccaacaaagccgcgccaggcgttgaccatgcggtgagaacaggtacgcgataccataatgtcagagtcagcgtactgacgcccattgccagccccagcgccgtcatccagccagagatttgtgcagtggtggctccggcgacaatcgctgcttgccagattattgccgctgaactggcgtagccaattaataccgccagaaaccccgccagtagcgtgggtggaggaatagaaaacagacgcatagtcacctcgtgcgttatagcgtacaggcaccgtagcatttgtccgttataacgcacaagtgataaacttccgttttgccggaggagtcgcatggaaaatctcgctcgctttttatccaccacacttaaacaactacgccagcagcgcggctggagtctttcgcgactggcagaagcgacgggcgtttctaaagcaatgttagggcagattgagcgtaatgagtccagtccgacggtcgcgacattatggaaaattgccaccgggttgaacgtaccattttcaacatttatttctccgccgcagtccgctacgccttcagtttatgatccacaacagcaggcgatggtgatcacttcgctgtttccttatgatccacaactctgctttgaacacttctcgattcagatggcatctggtgcaataagcgaatcgacgccccatgagaagggggtaatcgaacatgtcgtcgtcattgatggacaacttgatctgtgcgttgatggggaatggcagacccttaattgtggggaaggcgttcgatttgctgcagacgtcacgcatatctatcgtaatggtggggagcaaaccgtacattttcattccctcatccattacccgcgcagttaagcgggaaaactatttcgcaacgtcgcgcttgtggctaaaatagccgccatttttcagctactggataagaatgtgaccgtatcttctcatcgacttgaactgttaagcccggcacgcgatgccgccattgcccgcgaagctattttgcacggtgccgatgctgtttatatcggcggccctggttttggtgcccgtcataatgccagtaatagcttgaaagatattgccgagctggtgccgtttgcccatcgttatggtgcaaaaattttcgtcacgcttaacaccattttgcatgatgatgagctggaacccgcgcaacggctgattactgacctctaccagaccggtgtcgatgcgctgattgttcaggatatggggattctggaacttgatattccgccgattgaactgcacgccagtacgcagtgcgacattcgtacagttgaaaaagcgaagttcctctctgatgttggcttcacgcagattgtgctggcgcgagagctgaatcttgatcagatccgcgcgattcaccaggctacggacgcgaccattgaattctttattcatggggcactgtgcgtggcctattcgggtcagtgctacatttctcatgcgcaaacagggcgtagcgccaaccgtggcgattgctcgcaggcgtgccgtttgccatacacattgaaagacgatcaggggcgggtggtttcctatgaaaaacatctgctgtcgatgaaagataacgatcagactgccaacctcggcgcgctgattgatgctggtgtacgctccttcaagattgaagggcgttacaaagatatgagctacgtgaagaatatcaccgcccattatcgccagatgcttgatgccattattgaagaacgtggcgatctggcgcgcgcttcatcaggtcgtactgaacatttctttgttccatcgacggaaaagactttccaccgtggtagcacagattattttgtgaatgcccgtaaaggcgatattggcgcgttcgattcgccgaaatttatcggcctgccggtaggcgaagtagtgaaagtggcgaaagatcatctcgatgttgccgttaccgagccactggcaaatggcgatggcctgaacgtgttgattaaacgtgaagtcgtcggttttcgtgccaatacggtcgagaaaaccggagaaaatcagtaccgcgtctggcccaatgaaatgccagcagatttgcacaaaattcgtccacatcacccactaaaccgtaatcttgatcataactggcagcaggcactgacaaaaacctccagcgaacgtcgggtggcggtagacattgaactgggcggctggcaggaacaactgattctgaccctcaccagtgaagagggtgtcagcatcacgcatacgctggacgggcagttcgacgaagccaataacgccgaaaaagcaatgaacaatctgaaggatggtctggcaaaactggggcaaaccctctattacgcccgcgatgtgcaaattaatttgccgggggcgctgtttgtaccaaacagtctgttaaaccagttccgccgtgaagctgctgacatgctggatgctgcgcgtcttgccagttaccagcgcggcagccgtaaaccggttgctgatcctgcgccggtttatccgcaaacgcatctgagtttcctcgcgaacgtatacaaccagaaagcgcgtgaattttatcatcgctatggtgtgcagctgattgacgcggcgtatgaagcacatgaagagaagggcgaagtcccggtgatgatcaccaagcattgtctgcgctttgcctttaatctgtgcccgaaacaggcgaaaggcaatatcaaaagctggaaggcgacgccaatgcaactggttaacggcgatgaagtattaacgctaaagtttgattgccgcccatgcgagatgcacgtcattggcaaaatcaaaaatcacatactgaaaatgccgttaccgggaagcgtagtggcatccgtaagtccggatgagctgctgaaaacattgccgaagcgaaaagggtaaaacgccagttttctggttactcacaacttattgaatctgcatgatattgcctgccgggtaaggcgttacgccgcatccggcatcaaatgactcaacgttgtcccgcttctggtttgcgcgatttttgccagtaaaaatgctcgcgcaaaccttccgccgactcttccgccacagcacgcaattcatcgctgtccgcttcatgacgcagctgatgatccacattctttacccacacaaattcatgtcctttgtgccctgccatgagttgtcctgaaaacagagcacacgttaataagacaaccgataacgccttcgtaaacatcctgccacctttttcttaccttttgccgctatgatgccgatcgtttcttgaggttattattcagttttgcaaattagcgcaaagaaattctggaatcttccttcctgattttgcattgcattctgccgttgcggcgatttagtgctattttcgagcaaattacacacggaggtaaacactaatgtttactttgttgatatactcagcggcagggaggcgatgtgaaacaaagcgagttcagacgttggctcgaatctcagggcgtcgatgtagcgaatggcagcaaccatttgaaactcaggtttcatgggaggcgcagtgtcatgccgcgtcacccctgcgatgagattaaagaaccattgcgtaaagcaatcctgaaacaactcggtttgagttaatcgccaattaaaaaggttaatgacatgcgagagacagtcgaaattatgcgttatcccgtcactcttacacccgcgccggaaggcggttatatggtttcttttgtggatatccctgaagcgttgacgcagggcgaaactgtcgctgaagcgatggaagcggcaaaagatgctttactgaccgcatttgatttttattttgaagataacgagcttatccctttaccttcgccattaaatagtcacgatcactttattgaagtacctttgagcgtcgcctctaaggtattgctgttaaatgcttttttacagtcagaaatcactcagcaagagttagccaggcgaattggcaaacctaaacaggagattactcgcctatttaacttgcatcatgcgacaaaaatcgacgccgtccagctcgcggcaaaggcgcttggcaaagagttatcgctggtgatggtttaattacagttaacgaaaagttgtcatttttaacaactgatatagactgccgaatcatctgcacataattacgattcgataatgaaaaaataccagcagcttgcagaacaattacgcgagcagattgcgtcgggtatctggcaacccggcgatcgtttgccttcgttgcgtgaccaggtggcgctttcaggcatgagctttatgactgtcagccatgcctatcagttgctcgaaagtcagggatatattatcgcacgaccgcagtcgggttattacgttgcgccacaggcaataaaaatgccgaaagcgccagtcattccagtcactcgagatgaagcagtcgatatcaacacttatatttttgatatgttgcaggccagtcgcgatccgtcggtcgttccgtttgcctcggcctttcccgacccgcgacttttccccctccaacaactaaaccgctcgctggcgcaggtaagcaaaaccgccacagcgatgagcgtgattgaaaacttaccgccaggaaacgcagaactgcgtcaggctattgctcgtcgctatgccttacagggcatcaccatttctcctgatgaaattgtcattactgccggggcgttagaggcattaaacctcagtttgcaagcggtaactgaaccgggcgattgggtgatagtagagaatccttgtttctacggtgcgttgcaggcgctggagcggctacggctgaaggcgttatcggtggcgacggatgttaaagaagggatagatcttcaggcgctggaactggcgttgcaggagtatccggtgaaagcgtgctggctgatgactaatagccagaatccactcggatttaccttaacgccgcaaaaaaaagcacaactggtggcgttgctcaatcagtacaacgtaacgctgattgaagatgacgtttacagcgaactttattttggacgggaaaaaccgctgcctgcgaaagcgtgggatcgccacgatggcgttttgcattgctcttcgttttcgaaatgtctggtgcctggttttcgtattggttgggtcgccgccggaaaacatgcacgtaaaattcaacgcttgcagttgatgagtacgctttccaccagctcaccgatgcagcttgcgctggtggattacctttccacgcgccgatacgacgcccatcttcgtcgcctgcgtcgtcagcttgcggaacgtaaacaacgtgcctggcaggcactgctgcgttatctgcctgcggaagtgaaaattcatcataatgacagcggttattttctctggctggagcttcccgaaccgttagatgccggcgaattaagcctggcggcactgacgcatcatatcagtattgcgccgggtaaaatgttttctaccggtgaaaactggtcacgtttttttcgttttaataccgcgtggcagtggggagaacgtgaagaacaggcggtaaaacaattaggtcaccttattaaagaatacctgaaatagatccccattcaatttctctcaggttgggtaatatgaatttcgaatagcagtcatatttcctaactccttgtctatactccagaagatagcttctcaaacggcataatgcgcggtagctcacaacctgattaaattttctcaggggcgaaggtgtgcctgctagccgccgtctatggttaaacaaggagatatttttacggcacggcggctgaacaattaattacgacaggagtaagactttatgagcaagacatttgcccgcagcagcctgtgtgcgctcagcatgacaataatgaccgctcacgccgccgaaccacctaccaatttagataaaccggaagggcgactggatattatcgcctggccgggatacatcgaacgcggacaaactgataaacaatacgactgggtaacgcaattcgaaaaagagacaggctgcgcggtgaatgtgaaaaccgccgcgacttccgatgaaatggtcagtctgatgaccaaagggggttacgatctggttacggcatccggcgatgcctcgctgcgtttgattatgggaaaacgcgtgcagccgattaataccgccttgattcccaactggaaaacgctcgatccgcgcgtggttaaaggcgactggtttaacgttggcggcaaagtttacggcacaccttaccaatgggggccgaacctgctgatgtacaacactaaaaccttcccgacgccgccggatagctggcaagtggtttttgttgagcagaatctgccggacggcaagagcaataaaggccgcgtccaggcttatgatggccctatctacattgcggacgctgcgttgttcgttaaagccactcagccgcagttgggcatcagcgatccgtatcaactcaccgaagaacagtaccaggcggtgctgaaagtgctgcgcgatcaacatagtttgatccatcgctactggcatgacactaccgtgcaaatgagcgatttcaaaaacgagggtgtggttgcttccagtgcctggccctatcaggccaacgccctgaaagccgaaggccagcctgttgctaccgttttcccgaaggagggtgttaccggttgggctgataccaccatgctgcatagcgaagcgaaacatccggtttgcgcctacaaatggatgaactggtcattaacgccaaaagtgcagggcgatgtggcggcctggtttggctcgttaccggtagtgccggaagggtgtaaagccagtccgttattaggcgaaaaaggttgtgaaaccaacggttttaactatttcgacaaaatcgccttctggaaaacgcctatagcagaagggggcaagtttgttccctacagtcgctggacgcaggattacattgccattatgggcggtcgctaacttcgctggggtgctttatgacgtacgcagtggagtttgacaacgtctcgcggttgtacggtgacgtgcgcgcagtagatggcgtcagtattgcgataaaagatggtgagttcttctctatgctggggccgtccggctccggcaaaaccacctgcctgcgcctgattgctggcttcgaacagctttccggcggggctatctctatctttggtaaacccgccagcaatctgccaccgtgggagcgggacgtgaatactgtctttcaggactacgcgctatttccgcatatgtcgattcttgacaatgtcgcctatgggctgatggtcaaaggcgtgaataaaaagcagcggcacgcaatggcgcaagaggcgctggagaaagtggcgttggggtttgtacatcaacgtaaaccgtcacaactttctggtggtcagcgccagcgggttgctatcgccagagcattggtgaatgaaccgcgcgtattgctgttggatgaaccgctcggcgcactggatctcaaattgcgtgagcagatgcagctggaactgaaaaaactgcaacagtctctcggtatcacttttatcttcgttacccacgatcagggcgaagcgttatcgatgtccgatcgtgtggcggttttcaataatggacgcattgagcaggtcgattccccgcgcgatctctatatgcgcccgcgcaagccgtttgttgccggattcgtcgggacatccaacgtttttgatggactgatggcagagaaactttgtggcatgacgggaagcttcgccctgcgaccggaacatatccgcctcaacacccctggtgaactgcaggccaatggcacgatccaggcggtgcaatatcagggcgcggcaactcgttttgaactgaaattgaacggcggtgaaaaactgcttgtgagtcaggccaatatgacaggcgaagaactgcctgccacgctcacgcccggacaacaggtgatggtttcctggtcgcgtgatgtgatggtgccgctggttgaggagaggtgaatggcgatgaatgtattgcaatcaccttcacgtccaggtctgggtaaggtgtccggtttcttctggcgtaatccggggctggggctgtttttactactgcttggcccgctaatgtggtttggcattgtttatttcggctcgctgctaacgctgttatggcagggcttttatacctttgacgatttcaccatgtcggtaacgccggaactgacgctggcgaatattcgtgcgctgtttaatccggcgaattacgacatcattctccgcacgctgactatggctgtggcagtcactatcgccagcgccattctggcttttccaatggcgtggtatatggcgcgctataccagcgggaaaatgaaagcgtttttttatattgcggtaatgttgccgatgtgggcgagctacattgttaaagcctatgcctggacgttattgctggcaaaagatggcgtggctcagtggtttttacaacatcttgggctggaaccactgctgactacgttccttacattacctgcggtgggcggcaatacgctgtcaacttccgggctggggcgctttctggtgtttctctatatctggctgccgttcatgatcctgcccgtgcaggcggcgcttgagcgtttgccgccgtcattgttgcaggcgtcagctgatctcggcgcacgtccacgacaaacctttcgctatgtggtgctgccgctggcgatcccgggtattgccgctggctctatctttaccttctcactcacactgggcgattttatcgtcccgcagctggttggcccgccaggatattttatcggcaatatggtttattcccagcagggggcgattggcaatatgccgatggcggcggcattcaccctggtgccgattgttcttatcgcactgtacctggcgttcgtgaaacgtctgggagcgttcgatgcactctgaacgcgcaccgtttttcctcaaactggcggcctggggcggcgtggttttcctacattttcccatcctgattatcgccgcttatgcgtttaacactgaagatgcggcgtttagttttccaccgcagggcctgacgctgcgctggtttagcgtggcagcacagcgtagtgatattcttgatgccgtgacactgtcacttaaagtggcggcgctggcgacattaatggcactggtgttagggacgctggcagctgccgcgctgtggcgacgagactttttcggcaaaaacgccatttcgctgttactgctgctgcccattgcgctgccgggcattgtcactggtctggcgttattaaccgcctttaaaaccatcaatctggagccgggatttttcaccatcgtggtcggtcatgcgactttttgtgtagttgtggtgtttaacaatgtcatcgcccgttttcgccgcacctcctggagtctggttgaggcgtcaatggatcttggggccaatggctggcaaaccttccgctacgtagtgttgccgaatctcagttcggcgttactggcaggaggaatgctggcgtttgccttgtcgttcgatgaaatcatcgttacgacctttacggcaggtcatgaacgaacgttaccgttgtggttgctcaatcagcttgggcgaccgcgtgatgtaccggtaactaacgtggtggcactgctggttatgttggtaacaaccttgccgatcctgggggcctggtggctaacccgcgaaggcgacaatggtcaataaccactgatacaggaatatgctatgcaacataagttactgattaacggagaactggttagcggcgaaggggaaaaacagcctgtctataatccggcaacgggggacgttttactggaaattgccgaggcatccgcagagcaggtcgatgctgctgtgcgcgcggcagatgcagcatttgccgaatgggggcaaaccacgccgaaagtgcgtgcggaatgtctgctgaaactggctgatgttatcgaagaaaatggtcaggtttttgccgaactggagtcccgtaattgtggcaaaccgctgcatagtgcgttcaatgatgaaatcccggcgattgtcgatgtttttcgctttttcgcgggtgcggcgcgctgtctgaatggtctggcggcaggtgaatatcttgaaggtcatacttcgatgatccgtcgcgatccgttgggggtcgtggcttctatcgcaccgtggaattatccgctgatgatggccgcgtggaaacttgctccggcgctggcggcagggaactgcgtagtgcttaaaccatcagaaattaccccgctgaccgcgttgaagttggcagagctggcgaaagatatcttcccggcaggcgtgattaacatactgtttggcagaggcaaaacggtgggtgatccgctgaccggtcatcccaaagtgcggatggtgtcgctgacgggctctatcgccaccggcgagcacatcatcagccataccgcgtcgtccattaagcgtactcatatggaacttggtggcaaagcgccagtgattgtttttgatgatgcggatattgaagcagtggtcgaaggtgtacgtacatttggctattacaatgctggacaggattgtactgcggcttgtcggatctacgcgcaaaaaggcatttacgatacgctggtggaaaaactgggtgctgcggtggcaacgttaaaatctggtgcgccagatgacgagtctacggagcttggacctttaagctcgctggcgcatctcgaacgcgtcagcaaggcagtagaagaggcgaaagcgacagggcacatcaaagtgatcactggcggtgaaaagcgcaagggtaatggctattactatgcgccgacgctgctggctggcgcattacaggacgatgccatcgtgcaaaaagaggtatttggtccagtagtgagtgttacgctcttcgacaacgaagaacaggtggtgaactgggcgaatgacagccagtacggacttgcatcttcggtatggacgaaagatgtgggcagggcgcatcgcgtcagcgcacggctgcaatatggttgtacttgggtcaatacccatttcatgctggtaagtgaaatgccgcacggtggacagaaactttctggttacggcaaggatatgtcactttatgggctggaggattacaccgtcgtccgccacgtcatggttaaacattaagttagatgttagtggctgttataggacggccactatcgttttaggttctgagtttaatggcggttaagtattagaatgattacattaataactagcgtaaaaattaggctaaatgtttgagggcgatttttcatcctgtcacagttgattagcataaggctttagagtatcgttattaaactaatactttataagtagaagtattaacaatgaaagttcaattgtacaaattcacggaagataaaaataaaacccttaccttcagatggacgaaaaaacactttgagttttgtatggataataaaatctttttaaatcataaggggaagaagtcgtataaagaaaggaatttatttcttttctcaaaaggtgacaagataacaattgaagataatgttattgctgaagaatattcaacaatgcctgtgaaaaatttctccagtgtcggcgctttttcatttccgacctgccatttttcagggaatatacgtataggtcgattttgtagtattgcatcaaatgtaaaaataatgggtgaaaatcatcctttgaatcgttttactactcacatgatgacttataacggtgaatttgataagtttgctatgagtgaatttgaacgtagctggacattgaaaccattcattaccaaacctgaaaatccgattataggaaatgatgtctggataggaaatgatgttgtattgaaaggtggcatcgcaataggtgatggtgctgttattgctgccaattccgttgttaccaaagatgtgcccccatatgccatagttgcaggagttcctgcaaaaataatcagatttaggtttgattcaaatgttattgatgaactgttgagaataaaatggtggaattataactactcagatcttccggataataacaagtgtgatgatataaattattttgttgaagagatgaatcgattgatatcaaatggaaatattcaagagagggactataaaaaattcaatctttctgaggtattcagaggcctataattatctgttttgcatgataaatgggcaagataaccagggcggggtttgcaatttcaatggggcagcgtcatcaaggaggttgcaaacatcctgccatgcatatactttacgccatctttttatatttacgttattccttgaaagtataaagcatttatagactcccgcgcgtataaagtattcataatagaaaaatgtgaaaacaagattccgtttgaatcagtaaactgtttgtatagacgacagtagggggatgttttctactcatttcaatgtagatgccagcaaaaagaagtaaatattaaggatgatgttgtaaacctggagagtatgagaagatcttgcgtactgtcagagcactgatttctctgacagtacgtgctgcgtgcaaaatcactacatcaaataaaccagccaaatctcatagagataagagtaaacaaaccaacagcagcaaagacatttatcagtactacagttctactggaaacattcatttttgccaccttttatcattgcccctatgtgtatagtacgggttaagaaaatccgcaataatactcattctgaagatggataagggcaagttgctgtttgatgtttttttctcaaaccggttaaaaaacttgatgcacgtcaaaaaatgacgcatatttgcgcgcgttttattcatctggctggacgcccgtacatgtctctctatcaacacatgcttgttttttatgcggttatggcagcaatcgcatttcttatcacctggtttctttctcacgataagaaacgcatccgtttcttaagcgcctttctggtgggggcaacatggccgatgagtttcccggtggcgctgttgttttcactgttttaaatcttactcactggcttgacggcaccacgcagacttatatcatttggatgaatcgataaatttcacaagtggctaaggagaaagtatgtcgcatctggatgaagtcatcgcgcgcgtggatgccgcgattgaagagagcgtcattgcccatatgaacgaattattaatcgccctgagcgatgacgcggagttaagtcgggaagatcgctacgcccagcagcagcgtttgcgcaccgctattgctcatcacggtcgcaagcataaagaagatatggaagcgcgccatgaacagttaaccaaaggcggcaccatcctgtgattaaaatgagcgtctggctaccaaccaggcgccaaccacaagtaaaattgcgccacaaattgggccgaacaacgcccgtagtggtacgccatgactgcggaagatatccagaaccagaccgccaatcagttggctggcgaccagtactgcaatagttgtcgccgctcccacattctgatatccgctgatactggcgaagacaaaaaacgatcccagcaagccaggtataagtgtccaccagcgcacgctggacaccagttcgccaaaccccgccataccttgtttaaaccataaaatagaaacaaagagcacaatccccaccagtgagttcagcaacatggcgatgagaatggtagaggaggtctgggtgatgcgcaccatcagcgtgttctggactaccagaccaattccggcggcaatcaaaaaggcaagggtgagcgactgattcatccaattgcgtccggttcagtgcgttcgtcgagttgcaactgcataaatgtcagatccagccagcgcccaaatttagtgcccacctgcggcatttgtgcggtgacgacaaatcccagcgactggtgcagatgcagcgaggcctgattttgcgattcgatcccggcgaccatgacatgcttcccgcaatcccgtgcttcatcaatcaatcggcttaacaatttacgccccagacctttgccctgatgatcgggatggacataaaccgaatgttccacggtatggcgaaaaccatcgaaactacgccagtcgccaaacgaggcatatcccgtcactacgccatcttcttcacttaccagcaccggataacctgctatggtccgcgcttcaaaccaggcaatgcggttatctgcatccaccgtttggtcattccagatagccgccgtatacaacacggcgtggttataaatttccgcaatggcagcacagtcggctttgcgggcaaaacggatggacatgtctggcctcaataaaataatgatgatgatgttatcaatactatcgaaaacagcccgaagcaacggattcctcgatgaaattattgcgtgttgcagaggggatgtgacggctgcaaacaaaaccaatcccgtgagcctgctactattgatggattcatgccaaaagcacaggagagcattatggggcaacaaaagcagcgtaatcgacgttgggttctggcctcgcgtccacatggcgcacctgttccggagaatttccgtcttgaagaagatgatgtcgccacaccgggtgaaggacaggtgttactgcgcacagtttatttgtccctggacccgtatatgcgtggacgtatgagcgatgagccatcttattcaccgccggttgatattggcggcgtgatggtcggcggtacggtgagccgtgtcgtggagtcgaatcatcctgattatcagcctggcgactgggtgctgggctacagtggatggcaggactatgacatatccagtggtgatgatctggtgaaacttggcgatcatccgcaaaatccatcgtggtcgctgggtgtgctggggatgccaggctttaccgcttatatggggctgctggatatcggtcagcctaaagagggcgaaacgttggtggtagctgcggcgacaggaccagtgggggcgacggtggggcaaatcggcaaacttaaaggttgcagagtggtgggggtagccggtggcgcggaaaaatgccgccatgctaccgaggtgttaggcttcgatgtttgtcttgatcaccacgcggacgattttgccgaacaactggcgaaagcgtgcccaaaaggtattgatatctattatgaaaacgtgggcggtaaggtatttgatgcggtgctaccgttacttaatacatctgcgcgaattcccgtttgtggcttagtgagcagctataacgctacagagctaccacccggtccggatcgtttacctctgctgatggctacggtgctgaaaaaacgtattcgcttgcaaggatttattatcgctcaggattatggtcaccgtatccatgagtttcagaaggagatggggcaatgggtgaaagaggataaaatccactaccgcgaagaaattactgacggtttagagaatgcgccacagacgtttatcggcctgctgaagggtaaaaacttcggcaaagtggtgatccgcgtggcgggtgatgattaaagtttcaacggcggcgtaagccgccataaaaatccaggcaaaaagcttattttcagctttaattaactaaccacgtcattgttctgctgctaataacaacaaaggtgagtggtttatgattattcactttaatacaccaggtgaactccttctgccatgcaggcagggttggacagaaaacacgcgaaggaattaaaatgcctggaacgggaaaaatgaaacatgtcagtttgactctgcaggttgagaacgacctgaaacatcagcttagtattggcgcattaaaacctggcgcacgcctgattactaaaaatctggcggagcaattaggtatgagtattacacctgtgcgtgaagcattattacgtctggtttcggtgaatgcgctttctgtcacaccagcgcaagcatttacagttccggaagtggggaaacgtcaattagacgaaatcaatcggatccgctacgaactggaattaatggcagttactctggctgttgaaaacctcaccccgccagacctggcggaactcgaggaattgcttgagaaattacagcaggcgcaagaaaagggcgacatggaacaaatcattaatgcgaacaggctatttcgcttagcgatttatcatcgctcaaatatgcccatcctgtgtgagatgattgagcaactgtgggtcaggatgggacctggtttacattatctctatgaagcgattaatccagcggaattacgggagcgtatagaaaactatcgtctattactcgccgcgttaaaagcaaaagacaaagagggatgcaaacattgtcttgctgaaattatgcaacaaaatattgctattttataccagcaatacaatcgttaaattaaatgcccggcaaataccgggcatcaaggtaattactcaaatctccacgcaatattcatgccgacaccataatttcgtccgggcgcaggttcgtaatatcgcccgtttgactcattgacaatgacagaaccaacgtattctttatcgaataaattatcgacacgaccaaataaatccacagttaaattgtggtaattgtatttatacccggtgaataagccgacgagagtataagacggcgcttttgccgtattttcatcatctgccataatatcgcccatataacgcgcttccgtgcctgcataccaaccatcttccggtacataacctatcgacgcaaagcccatattacgggcgatccctggcatccgattaccgttacaatcctgttcgttgcaaacattgctgcgataggtcgcatcaagccaggtccaggacgcgtttacgcgaaaatctcccgcgaaacgttgatcccatgccagttcagcgccttgacgacgggtctttccggcatttttgtaagtcgtacgcccaccgctactgctatcgacaacaatttcatcatcggtgtcggtctggaacaatgcgagactaagcagcccatcaccaatacgcgttttactgccgatctcaattgtatcgttggtggatggttttaaaccaaagttcataccgctttgcccatcagcacgataagacagctcattaaccgtcggcgtttcaaaaccacgcccggctgccagatagatattccaggcatcggtcattgcatattttagcgatccggcaggtagccatttgtgataactggcatcaccgctgtcatcgccgttacccggagtaacgtaatggtcgttggaatcaaaccatacggagctgtagcgcacgccagcatccagcgacagtttttcgctcagctgccactgcgtctgtaaatagggatcgacgttccacatcagattgcgttcgtcgcgacgcaactcacctttttgcccgtattccggcacgccgctattcaggcgaaagttattgtagcccttgcggttttcactcatgttttcgtagttcaggccggtagtgaacgtgaccggaacgcccagttcaccacggtgtgtccagcggctgtctatcccctgataatggcgttgcagagtaatcacgccgcccgcatgcgacgggttaagttggggggccatcgggattgactggtactgggtcgtttctcgctctccggcatacatcatcacactcatatcatcttgcgcgctcaggctacgctcatagcgcaacccagcctgagtttgcttgatggtttttcgcgtgtcgtactgttctgcacgaggcgcttgttgtggattcgccttccattctgctttggttagcccacctgggtcatctgctttgatatccacactattgaaaatcaggcttaatttgctggcgtcatcaatgcgtacgcccagtttggcattggctaaatttttctgtgcgccactatggtcacgatagccgtgggtcgtaaaacgcgtggttgagacggtgtaatcgacatcgccgggctgtgtgccgtcgcccgttgcgccggttgctttcagcccatagcgccagctgccaaaactgccgtagtaactactggcttcaacggttggtggctgttgtccggtctgggtggtgacattcattaccccaccagacgcgttgccatacagggcagagaaggggccacgcagcacttccacattttgcacactgcttaaatcgatattggatgtctgcccttgcccgtcgggcatggtggcgggaataccgtccacatacaggcgaataccgcgaatcccgtaagtggagcgggagccaaatccgcgaatcgacagctgtaaatcttgcgcatagttctgccggttttgtacctgcaaaccaggcactccggtcagtgattcagacaagttaatgcgcggtgttgccaggcgcatctcctcgccatccaccacgcttactgctgctggcgtatccagctcggaaaccacctgcggtgcggcactgacaatcatagtctgttcatcagcggcaaaaacaacgggggaaagggcaagcagtgcgggcaaaacggtctgtcggacggaaaaaatcttcatgaaaaaagccaggttaagaatgggaaaacgccgtcatggtaataaaattgtaaatttatggaaaacgaaacggcacgatacgttaagtaattgagaaaattgtagtcgtaacggcaagaaatgctccacatttgagaaaataatgattaccattcccatttataacaagagcgtaacgatgattacgcttagcgaagcattgtgaagcagcaaaaatatcggttcatcaaagggagtcgtcatgcatttacgtcatctgttttcatcgcgcctgcgtggttcattactgttaggttcattgcttgttgcttcatcattcagtacgcaggccgcagaagaaatgctgcgtaaagcggtaggtaaaggtgcctacgaaatggcttatagccagcaagaaaacgcgctgtggctcgccacttcgcaaagccgcaaactggataaaggcggtgtggtttatcgtcttgatccggtcactttggaagtgacccaggcgatccataacgatctcaagccgtttggtgccaccatcaataacacgactcagacgttgtggtttggtaacaccgtaaacagcgcggtcacggcgatagatgccaaaactggcgaggtgaaaggccgtctggtgctggatgatcgtaagcgcacggaagaggtgcgcccgctgcaaccgcgtgagctggtggcagacgatgccacgaacaccgtttacatcagtggtattggtaaagagagcgtgatttgggtcgttgatggcgagaatatcaaactaaaaaccgccatccagaacaccggtaaaatgagtaccggtctggcgctggatagcaaaggcaaacgtctttacaccactaacgctgacggcgaattgattaccatcgacaccgccgacaataaaatcatcagccgtaaaaagctgctggatgacggcaaagagcacttctttatcaacattagccttgataccgccaggcagcgtgcatttatcaccgattctaaagccgcagaagtgttagtggtcgatacccgtaatggcaatattctggcgaaggttgcggcaccggaatcactggctgtgctgtttaacccagcgcgtaatgaagcctacgtaacgcatcgtcaggcaggtaaagtcagtgtgattgacgcgaaaagctataaagtggtgaaaacgttcgatacgccgactcatccaaacagcctggcgctgtctgccgatggcaaaacgctgtatgtcagtgtgaaacaaaaatccactaaacagcaggaagctacccagccagacgatgtgattcgtattgcgctgtaatagatatggcgagggtgaaaacggagagacttgcctaccttttatcacggcgtatccggcactttcgtcagtaatctgaatttgcccggcacgtagccgggcaattttgcaattaactcgccgtttcaggcttaaacacaatttcctgtttttcttcatcttcctcgacgactggcgcagtgctgtgaatttcagcaacgcgtttgcgcacaccaaaccagcctataaccagcagaataccgataatcggcagcgccgcgatagtataagtcccgttcgggtaatcgaacgccatcagcacaaggacactcagtaaaaacagtaatgtcagccaggaagtgaagggcgcgccaggcagtttaaaactgacatccgctgctttgccttctttaatcgctttacgcaggcgcatctggcacacgatgataaacgcccatgaagcgatgattcccagcgacgcgaagttcaacacaatctcaaatacgcgcgacggcaccagatagttgaggaatacgccgacgacatacacaaccagtgtcgccagaatcccggcatacggcacatgctgacgactcattttcgccataaaactcggtgcggaaccgcccatcgccatcgagcgcagaatacgtccggtgcagtacagacctgagttcaggctggagagggcagcggtcagcaccacaatgttcataatgctgccgatgtacggcacacccagtttagagaaaaacgtcacgaacggactttgccccgcctgatacgcgctccacggcaataacataaccagcaacaccacggagccgacgtaaaacaggccaatacgccaaatcacactgttaatggctttaggcaccatggtctgcggatctctacattctccggcagctgtacccaccatttcaatggaggcaaaagcaaacactacgccctgaatcaacaccagcgcaggcagcaaaccgtgggggaagaagccgccgttatcggtgattaaatgaaagccagtggtgttgccatccagcggctgaccactaccgaggaacactgtacccacgaccaaaaaggtcacaatggcgagcactttaataagtgcaaaccagaactccatctccgcaaaccatttcacaccgatcatattcatggtgccaacgatggtaagtgcagcgagcgcaaagacccactgcggcacgccgccaaacgcaccccagtaatgcatatacagagcgacggcggtaatatcaacaatccccgtcatcgcccagttgatgaagtacatccagccagcaacataagcggctttctcacccaaaaactcacgggcataagagacaaaactgccactggaagggcggtgtagcaccagctcacccaatgcacgcagaataaaaaacgaaaacaagccacaaattaaataaaccagtgccagtgctggacccgccatttgcagtcgggctcctgcacctaaaaacaagccggtgccaatcgcgccgccaatggcgatcatctgtacctggcgattgcccatcgctttgtgatacccctcttcgtgggcattaagccagcggcgtttcgcggcgtgttgatctgaagtgtcggtgtcgtgtttactcattgctctccctgattgctttaatgaaaaagtcatataagttgccatgaacaatgtttattcatcctggcgatgatagttatcaccattattctttatgggtataaaactatcggcgcagcatcctacccgttatcgataaacgatgcaaaacatccccttacaatcctgaaggggattcatacaactgacgaaaaaatgacaaatccttttgctggttaacctgtgtactgtcctacacttaatctttaaaagattgtgaggggcatatgattaaggtgtatggcgtacccggatggggctctacaatcagtgagctgatgctaacactggctgatattccttatcagttcgttgatgtcagtggttttgaccacgagggaacttcacgcgagttattgaaaaccctgaacccgttgtgtcaggttccgacactggctctggaaaatgacgagattatgacggagacagcggcgattgcattgatggttctcgatcgtcgcccggaccttgcgccaccggttgggcgcgccgaacgtcagcagtttcaacggctattggtctggctggttgctaatatctatccaacattcactttcgccgattaccctgagcgttgggctcctgacgcacctgaacagttaaagaagaatgttattgaatatcgaaaatcgctttatatctggttgaattcgcagctcactgctgaaccttatgcgtttggtgagcaactaacgctggtggactgttatctttgcactatgcgtacatgggggcctgggcatgaatggtttcaggataatgcgcagaatatcagcgcgatcgctgatgctgtatgtcagttaccgaaattacaagaagtattaaaaaggaatgaaattatttgagtgggataccagaagattatgttatttattattcagtaactttatccacaatgatgggcgtaattaattagattcatgttatgttttttaatttatatcactctccctttcattcagcttgtctatttcatttcctctgaaaagaaactaactattcacattgtgcagatgtttcagttgttatcacaggcattctataatctcaaaatgtttttaatgatggatatgctcggagttggagatgcaattaatattaatacaaataaaaacatccggcaggtatgctaaaaggataaatggcgttctctgtatttattcgcgattatctgtaggacaaatatggagagcttgatgagtcagagctaaaacagcaattgataaataaacatgttgatttattcaagaaaatggatgtattttaaatattgattcttaatataacctaatcaatagattatcacgtgagagctgcacattattgggggggttggggaaaacaccattttgggaacaatgaatcaggtactcttaccactgaagcaagattatccgggcaccaggtggtggtgcagtgctttggaaatggtcacctcgggggagttgtcattattttctatgctatttgcttatgatattcatcaggtgaatttaataaattcctaatttgaaatatccactattaagccagtgtttaacgacgttaagatggcaatgtgcagatcatgttatcagggtggggcggtagcgtatattccttatacaaaccatcattcatttcaatgattgtgattgaattatttattgttgtgaataaaaatacattatgaatattggtttgactttgcatatcaggttttttattactcgctgtaatgtacgagcctgtcgtgaataacgtcgagaacccatccgttgcgtttgtgattattttgttgactaaacagacccccgtttctctgaagtaaaatcccagactaaatcatcacataatcatgacatttttctgatattccccggtaacgccagatgtcgactcgcttatttcatccgcccgacatgttgtacatgcaatatgtgcggattattattcattttcacggaggttgctatgtcaaccggattacgtttcacacttgaagtggacggcctgccaccggatgcttttgcggtggtttcctttcatctcacccagtcactctcttcacttttttccctcgacctttctctggtcagtcagcagtttctttcccttgaatttgcgcaggtgctggacaaaatggcctacctgacggtatggcagggcgatgacgtacagcgccgggtgaaaggtgtggtgacctggtttgaactgggggagaacgacaaaaaccagatgctgtacagcatgaaggtatgcccgccgctgtggcgcacagggctgcgtcagaacttccgtatcttccagaatgaggacatcgaaagcatcctcgctacgatcctgaaggaaaacggtgtgaccgagtggagtccgctgttcagcgagccgcatccttcccgtgagttttgtgtccagtacggcgaaaccgattacgatttcctgtgccggatggcggcggaggaaggcatcttcttttatgaggagcacgcgcaaaaaagtaccgaccagagcctggtcctgtgcgacaccgtgcgttatctgccggagtcctttgagatcccctggaacccgaacacccgtaccgaggtaagtaccttctgcatcagccagttccgctacagcgcacaaatccgtccttcttccgtagtgaccaaagactacacctttaaacgtcccggctgggctgggcgttttgaccaggagggccagcaccaggactaccagcgcacgcagtatgaagtgtatgactaccccggacgtttcaaggacgcccacgggcagaactttgcccgctggcagatggacggctggcgaaacaacgcagaagtggcgcgcggaacaagccgttcgccggagatatggccgggacggcgaattgtgctgacggggcatccgcaggcgaacctgaaccgggaatggcaggtggtggcaagtgaactgcacggcgagcagccgcaggcggtgccgggacgcagtggttcaggcaccacgctgaataatcactttgcggtgatcccggcagacagaacatggcgaccacagccgttgctgaaaccgctggtggacggcccgcagagcgctgtcgtgacgggaccggcaggcgaggaaatcttctgtgatgaacatggccgcgtgcgggtgaaatttaactgggaccgctataacccgtcaaaccaggacagttcatgctggatccgtgtggcacaggcgtgggcaggcaccggctttggcaacctggcgataccgcgtgtgggtcaggaggtcattgtggacttcctcaacggcgatccggaccagccgattattatggggcgtacctaccaccaggaaaaccgcacacccggcagcctgccggggacgaagacgcagatgaccattcgttcgaaaacctataagggcagcgggtttaatgaactgaagtttgacgatgcgacagggaaagaacaggtctacatccacgcgcagaagaacatgaacaccgaggtgctgaataaccgcaccacggatgtgataaacaaccatgctgagagcattggcaacaatcagatgattgcggttaccaacaatcagatacagacggtgggtgttaaccagatagagacggtgggcagtaaccagatcattaaagtgggctctgttcaggtggaaacgattggacttgttcgtgcgctgaccgtgggcgtggcgtatcagacgacggtaggtggcattatgaacacctcggtggcactgatgcagtcctcgcagatcggtttgcataaatcgttgagggtcgggctgggttatgacgtcaaagtcggaaataacattaccttcaccgttggtaaaacgaaaaaggatgataccgggcagaccgcgatttactccgccggtgagcatctggagctctgctgtggtaaggcaaggctggtgctgacaaaggacggtcaaatttttctcaacggcacaaaaattcatttgcagggtaaggagcaggttaatggtgactcactgttgattaactggaactgtgcagcctcgaaatccccaccgaagacccctgatgaaaagcaggatacgccggatatgagagagtactgatcccgtacctgttcggtattcaataacaaaccagcattaaaaataaacagaagaaggaatttgaatcatgagcggaaaaccagcggcgcgtcagggagatatgactcagtatggcggccccattgtccagggttcggcaggtgtaagaattggtgcgccaactggtgtggcgtgctcggtgtgtccgggcgggatgacctcgggcaacccggtgaacccgctgctcggtgcaaaagtacagcccggcgagacggaccttgcgctgcccggcccgctgccgttcattctctcccgcacctacagcagctaccggacgaagacgcctgcgccggtggggatttttggccccggctggaaagcgccttctgatatccgcttacagatacgcgatgatgcactggtactcaacgacaacggcggacggagcattcactttgagccgctgctgccgggtgaggcggtgtacagccgcagcgagtcaatgtggctggtgcgcggtggtaaggcagcgcagccggacggccacacgctggggcggctgtggggggcgctgccgccggatatccggttaagcccgcatctttacttggcgaccagcagcgcacagggaccgtggtggatactggggtggtcagagcgggtgccgggtgctgaggacgtactgccagcgccgctgccgccgtaccgggtgcttaccgggctggcagaccgcttcgggcggacgctgacgtaccggcgtgaggccgccggtgacctggccggggaaatcacgggcgtgacggacggtgccgggcgggagttccgtctggtgctgaccacgcaggcgcagcgtgcggaagaggcccgcacctcttcgctatcttcttctgacagttcccgccctctctcagcctcagcgttccccgacacactgcccggtaccgaatacggccccgacaggggtatccgcctttcggcggtgtggctgatgcacgacccggcatacccggagagcctgcccggtgcgccactggtgcggtacacgtatacggaagccggtgaactgctggcggtatatgaccgcagcaatacgcaggtgcgcgctttcacgtatgacgcgcagcacccgggccggatggtggcgcaccgttacgcgggaaggccggagatgcgctaccgctacgacgatacggggcgggtggtggagcaactgaacccggcagggttaagctaccgctatctttatgagcaggaccgcatcaccgtcaccgacagcctgaaccggcgtgaggtgctgcatacagaaggcggggccgggctgaaacgggtggtgaaaaaagaactggcggacggcagcgtcacgcgcagcgggtatgacgcggcaggaaggctcacggcgcagacggacgcggcgggacggaggacagagtacggtctgaatgtggtgtccggcgatatcacggacatcaccacaccggacgggcgggagacgaaattttactataacgacgggaaccagctgacggcggtggtgtacccggacgggctggagagccgccgggaatatgatgaaccgggcaggctggtatcggagacatcgcgcagcggggagacagtacgctaccgctacgatgacgcgcacagtgagttaccggcgacgacaacggatgcgacgggcagcacccggcagatgacctggagccgctacgggcagttgctggcgttcaccgactgctcgggctaccagacccgttatgaatacgaccgcttcggccagatgacggcggtccaccgcgaggaaggcatcagcctttaccgccgctatgacaaccgtggccggttaacctcggtgaaagacgcacagggccgtgaaacgcggtatgaatacaacgccgcaggcgacctgactgccgttatcaccccggacggcaaccggagcgagacacagtacgatgcgtggggaaaggcggtcagcaccacgcagggcgggctgacgcgcagtatggagtacgatgctgccggacgtgtcatcagcctgaccaacgagaacggcagccacagcgtcttcagttacgatgcgctggaccggctggtacagcagggcggctttgacgggcggacgcaacgttatcattatgacctgaccggaaaactcacacagagtgaggatgagggacttgtcatcctctggtactacgatgaatcggaccgtatcactcaccgcacggtgaacggcgaaccggcagagcagtggcagtatgatggccacggctggctgacagaaatcagccacctgagcgaaggccaccgtgtcgctgtccactacggctacgacgataagggccgcctgacgggcgaacggcagacggtggagaacccggagacgggggaactgctgtggcagcatgagacgaaacacgcctacaacgaacaggggctggcaaaccgcgtcacgccggacagcctgccgccggtggagtggctgacctacggcagcggttacctggcgggcatgaagctgggcgggacgccgctggtcgagtatacgcgggacaggctgcaccgtgagacggtccgcagcttcggcagcagggcaggcagtaatgccgcatatgaactgaccagcacatacacccccgcaggccagttacagagccagcacctgaacagcctggtgtatgaccgtgactacgggtggaatgacaacggcgacctggtgcgcatcagcggcccgcgacagacgcgggaatacggctacagtgccacgggcaggctggagagcgtgcgcaccctcgcaccggacctggacatccgcatcccgtatgccaccgacccggcgggaaaccgcctgccggacccggagctacacccggacagcacgctcacggcgtggccggataaccgcatcgcagaggatgcgcactatgtttaccactatgatgaatacggcagactgacggagaagacggaccgcatcccgacgggtgtgatacggacggacgacgagcggacccaccactaccactacgacagccagcaccgcctggtgttccacacgcggatacagcatggcgagccactggtcgagagccgctacctctacgacccgctgggacggcgaatggcgaaacgggtatggcggcgggagcgtgacctgacggggtggatgtcgctgtcgcgtaaaccggaggaaacatggtacggctgggacggcgacaggctgacgacggtacagaccgacaccacgcgtatccagacggtataccagccggggagcttcgcgccgctcatccgcatcgaaacagacaacggtgagcgggagaaagcgcagcgccgcagcctggcggagaagctgcagcaggaagggagcgaggacgggcacggcgtggtatttccggctgaactggtgcggctgctggacagactggaggaagaaatccgggcagaccgcgtgagcagtgaaagccgtcagtggcttgcgcagtgcgggctgacggtggagcaactggccagacaggtggagccggaatacacaccggcgcgaaaagttcatttttaccactgcgaccaccggggcctgccgctggcgctcatcagcgaagaaggcaatacggtgtggagcgcggaatatgatgaatggggcaacctgctgaatgaggagaacccgcatcacctgcaccagccataccgtctgccggggcagcagcatgatgaggaatcagggctgtactataaccgtcaccggtactacgatccgttgcaggggcggtatattacacaagaccccattgggctggaggggggatggaacctgtataattacccactgaatccgataataaggatggatcctttgggtttgtataatttatatcaattattatatgatgtttggcatgatgattcatatggaacatcatcaattgatattactggcagtggagatctaatatcattaggtggtcatgcaggacttggcgttgcgtttgctaaaaagaaaggtgaaatgttatctgatatttgtatttatgctacagcatgcggacatgcaggaattggtggtgggataaatgcggctatcacatattctgagaccaagtctttacctacatcgggagtcagcaattcagtaggtgtaacggttggcggcggagttgggggacattttgcgtatacttatgtagtggatgttgataatccagaatcatcgacagaatctgttggtatcggtgcaggtgttgacgcttcagttatgactctggcttgtagaacgtggcaagaatgctgggtcaattaacaggaggaaatatgaaaaaatatatatttttagttttatttttattgtgtggttgttctccagtggacatagagccagctagacaagaagttaatatctttcgtggtttatatcagacagggaaatacagtgatatatataaaatcacttcaagtgattttcagactgccacatctgaaaaaaaatttatcgacataatgaacgaagcaaaagaaaaagatcttgggacttataaaaaatcaacccttaaaactgaaaaaatcactcgcggattattttcaaacgatgaaattacattgatatatttctcagaatattcaaaaagaattgtccaagaggtttttgtgtttaatgttgaagacaaaaaagtaaaattaaaaggttataggtatgattcgattaattaaaatttttgatgatgacttcaattagtagaacatgtatttttcgataaaagcaccgatgactttttcatgaagttctacagagcgcgagaaacagatggttctgcgagtcagacgtttgattcaggttctcaggggcagattcagggaaagatcatcgtgtgccgtaggcacaaagatgcaaaacgggacattttgcatgtaataagcataagcttgtgaagagatggtggcaggcccaccgggatctgctgtcggaagtcggtcccaaacaaccccggctgctgtggtaaagagccatggtagcagggaaagatcatcagaagttcactttttgtactaaacaattcgcattttatgtttaaaaattgagatattccttattacctaaagctgttttttattgcttacacatgatcaaatactccttacataattaaggagaacaaaatggaacttaaaaaattgatgggacatatttctattatccccgattacagacaagcctggaaaatggaacataagttatcggatattctactgttgactatttgtgccgttatttctggtgcagaaggctgggaagatatagaggattttggggaaacacatcccgattttttgaagcaatatggtgattttgaaaatggtattcctgttcacgacaccattgccagagttgtatcctgtatcagtcctgcaaaatttcacgagtgctttattaactggatgcgtgactgccattcttcagatgataaagacgtcattgcaattgatggaaaaacgctccggcattcttatgataagagtcgccgcaggggagcgattcatgtcattagtgcgttctcaacaatgcacagtctggtcatcggacagatcaagacggatgagaaatctaatgagattacagctatcccagaacttcttaacatgctggatattaaaggaaaaatcatcacaactgatgcgatgggttgccagaaagatattgcagagaagatacaaaaacagggaggtgattatttattcgcggtaaaaggaaaccaggggcggctaaataaagcctttgaggaaaaatttccgctgaaagaattaaataatccagcgcatgacagttacgcaatgagtgaaaagagtcacggcagagaagaaatccgtcttcatattgtttgcgatgtccctgatgaacttattgatttcacgtttgaatggaaagggctgaagaaattatgcgtggcagtctcctttcggtccataatagcagaacaaaagaaagagctcgaaatgacggtcagatattatatcagttctgctgatttaaccgcagagaagttcgccacagcaatccgaaaccactggcatgtggagaataagctgcactggcgtctggacgtggtaatgaatgaagacgactgcaaaataagaagaggaaatgcagcagaattattttcagggatacggcacattgctattaatattttgacgaatgataaggtattcaaggcagggttaagacgtaagatgcgaaaagcagccatggacagaaactacctggcgtcagtccttacggggagcgggctttcgtaatcttgccctgggcattattgtcgtataaacgctttaccggacacatgacattcacaatgtgtgttaattttactgacatctttcaaaaggagcgtaatcatgccgcacatcgacattaaatgttttccgcgtgaactggacgaacaacaaaaagcagcacttgctgcagatattaccgacgttattattcgtcatctgaacagtaaagacagttcgataagcattgctctacagcagattcaaccagaatcttggcaagctatctgggatgccgaaatcgcgccccaaatggaggctttgataaagaaacctggttatagcatgaatgcttaacccgccgtaacacgcttgccgctggtaacaaacgtcccagcacctaaatgatgcaacgtattgagcttatcatcatcaaactgccagcggccttcgacaaatacccgtgcgtctgccgctgctgatactacttcgccaaacagcgtgtcgtattcttcttgcgcagaagtcgcaggtagcaatcgacactccatccacgccagacatttttcctcgaccagaggcaaaccaaataccgggcctctcacaaccggaatgccatagcaattaaatttatcttcatcacgccccgacacacttcccaccgcccacgtccagttagttgctgcaacgcccgggataacgatgccaaatttaccgttatgttcaatcaactccctggtccatgtcgatttatctaccacaatcgccacgcgtggaggttcaaactccaccggcattgaccaggctgcagccataatgttacgccgctgggattgctcatcgaaactggtgatcaagaccgttgggccatgatttaacagacggctggcatggtgtaattctatggggatgaatcggctcatggtatcgcctcgcgaagaaggtttttttaagcgtagtccgtaacgcaataagtaacgaaattaacgggattggcgatttgcgaacgtgatgcatgtccgcgatcgcacaaaatagccggtgcggcgtctattccaggttataagttgagaaaaccactaagggaaacgcctgatgacgcccattctgaatcactattttgcccgtattaactggtcgggagctgctgcggtcaatattgatacgcttcgtgcattgcacctgaaacacaattgcaccattccgtttgaaaacctcgacgttttgctgccgagggaaatacagcttgataatcaatcgccggaagagaaactggtgatagcccgtcgtggcggttactgttttgagcagaatggcgtgtttgagcgggtgttacgcgagctggggtttaacgttcgcagcttgttagggcgcgtagtgttatcaaatccgccagcattaccgccgcgcacccatcgtttgctgttggtggaactggaagaggaaaaatggattgctgatgtcggtttcggtgggcagacgctaaccgcgccgattcgtttagtttccgatctcgtgcagaccacgccacacggagagtatcggttgttgcaggagggtgatgattgggtgttgcagtttaatcatcatcagcattggcagtcgatgtaccgttttgatctctgcgagcagcaacaaagcgattatgtgatgggcaatttctggtcggcgcactggccgcagtcgcattttcgccatcatttgctgatgtgccgccatttgccggacggcggcaagctgacactgaccaattttcattttacccattatgaaaatgggcacgcggtggagcagcgaaatctaccggatgtggcgtcattatatgctgtgatgcaagaacagtttggtctgggcgtggatgatgcgaaacatggctttaccgtggatgagttagcgctggtgatggcggcgtttgatacgcacccggaggcgggaaaataatttatgtcaggttgccggatgcggcgtaaacgccttatccggcatacattaacccggttgtagacctgataagcgaagcgcatcaggcaacggtttcagagtttaattgcccattcggcatgaaacaaaatcaccgccgcgccagaaatggtgactttttccggttggttatcacgaattgtcaccgtcacttcaatcacgccgtcacgccccaatgcgcgcccctgattgcctttaacacgcagcaccttgccatcgtggggcaatacgttgtgatgtaccaaccatgcacccatcgggccattggcattgccagtcaccggatcttccacaataccaatcgcaggcgagaacatacgaccatcggtttcgtttttgcctggacggatctggaacgggaagaaaccattgcagccaatctgtttactgatagcggtcagcgcattaaggtcaggcgaaagagcgtcgatatccacttccggcttcaatgggagcatcactttagaatgcccggtcgtcgcgacctggatcggcaaacccggcagaatatcgtcttcagtaagatgcaatgcgttgataatcgccgcgcgtacttcaccctccagcggcagttcaaagcccggcgtaccttgttccagcgaaatacgataatcatcgttgtgcttttcgatagtcacgcgatgttttcctgccagcgatgtttgccagatcgtgcaatttcctaaacctaacaccttcgcacgtacatagtgcgcagctactgtcgcgtgaccgcaaatcggcacttcaaccgttggcgtaaagtagcggatgcgcacatcgctgtcgtcgctgtgcagcagaaaagcagtttccgaatggcctaactcgcgggcgataagctgcatttgcgcttcgctaagattatcggcggggaaaacaacaccggcagaattgccgcgaaacggttgtgaggtaaaagcatcgacgtggtacacctgcggtttcattaacgttctcctgtgactggagaactatcatagcctgcaagtggccggagagcgaagggctatccggccagggtgaaattatcgccgcgaacgcacaatttgatatcgacgagtaaagtactcaaacggcgcgctccacacatgcaccagtcgggtgaacgggaagagcaggaagatggtcattcccaacaccagatgcaggcggaagacgaacgctacgccgttgagcatctctgacgatccaccacggaaagtgacaatgctttgcgcccaacccaccagcttcatcatttcgctaccatcaggatactgtgctgaaaacggtatggtacttagccccaacagacactggaccagcaaaatgctcatgatgatgatatccggcgtagtggaagtggcacgcacgcgctgatttgtcagcctgcgccacagcagtcctgcgccgccaatcaacgtcaacacaccgcaaataccgccgagcaccatcgccatgagttgtttcgctgccactggcaaaaaccacgcgtacatccagtgcggcgttaacatgccgaacaagtgcccgaagaaaatccccaaaatgccgatatggaacagattcgaccatatcaccatcccgcgtttatcgagcatttgacttgaggaggcgcgccaggtgtactgcccgtagtcgtagcgcagccagctgccgaggaaaaacaccgtcgcacaaatgtacgggtagatatcgtaaaaaaagacgttcagatactgaatcatttcccacctcccgcactgatgtcgacatattgcggcgcgacatcctggctaaagcgtcgctgatattgattaagcggcgagctgtcacacgccgtggcgttatcttcaataaacttcacctgttcctcttcccacactgcatcaagcgcctggcgggtgtcatcgcgctcttcgctgtttacttgttttgtgacactgtcacttgaaagggagcttcccgccagttgcagcagagcatcaaacaacgcgtaccacggtgcctcgcgttgttttaagcgaccgccaagcagggcgaggatcggcgcaacattgagcaatccttctttcgcctgatcgtcaggcagtacgcttaaatactccagatacagcggtagataatcgggcagttcccgacaatccagttgcaggccgaccttttcatactccgccagcaggtccaccattgcctggccgcgatcgcgggactcggcatgaacatgttcgaacagcagcagcgatgtggtacgtccacggtcaaacacttcgcaccattcggcctgtttatccagcagcggcgcgttaagcaggttgtgggtgaaatccgtaagcatcggcgcgtcgcggcggatcaacgccagcgcgtcctccttgcattcccacaacagctcatccggatactccatcaacaggccgatcactttgaggatctgcattattcgccctccgctttgtcgcgcacttcggtgatgttgatggcatcgatacggctactgttgaacaggttgaatttgctgtccgagccgtgacaaccgtcgccaaaggtaaaaccgcagccgttgcgttctgcgaaggcatcgcccgccatttcccgatggctggtcgggataacaaaacgatcttcatagttggcaatggcgagatagcgatacatttcttcgacctgggcgacgctcaggcctacttcgtcgatggcacgagtatcagtaacgccttccacggtttgtgaacgcatatagtggcgcatcgccatcatccgtttcagcgcccgcagtaccggaccggtatcgccggcactcaacatattggcgagatattgcaccggaatacgcaggctttcgatggcgggcagcacgccttcgcttttcggcaaaccgcccgcatctgcgtaggactgaatcggcgacagcggaggaacgtaccagaccatcggcagggtgcgatattcagggtgcagcggtagcgccagtttccagtccatcgccattttgtagacaggcgaacgctgggcagcttcaatcacgttttgtggaataccttgtttcagggcttcctcgatcactgagggatcgtgtggatcgaggaacacttcgcactgacgttcatagaggtcaacttcgcgctcggtgctcgccgcttcctcgatgcggtcggcgtcgtaaagcagcacgcccagataccggatgcgacccacgcaggtttctgagcacacggtgggttggcctgactcaattcgcggataacagaagatacatttttctgacttgccgcttttccagttgaagtagatttttttgtacggacaaccgctaatgcacaaacgccagccacggcatttatcctgatcaatcagcacaatgccgtcttcttcgcgtttgtagatagcgccgcttgggcaggtcgccacgcaactgggattgaggcagtgttcgcacaggcgcggcaggtacatcatgaaggtgttttcaaactgcccgtacatctccttttgtatggcctcgaagttgcggtcgcgggcacgtttttcaaactcgccgcccagcagttcttcccagtttggcccccagatcactttgtccatctgcttaccgtcaatcagcgagcgcgggcgagcagtagggatatgtttgccttccggtgcgctatgcaaatgttcgtagtcgaaagtgaaaggttcgtagtaatcatcaatctgcggcaccaccgggttggcgaagattttggttattacgcccatcttgctgcccagacgcggacggatcttgccattcacatcgcggacccagccgccttgccactcttcctgatcttcccagtttttcggataaccaatgcccggtttggtttcgacgttgttaaaccatgcgtactccatgccttcgcgcccggtccagacgtttttacaggtcaccgaacaggtatggcagccgatacatttgtcgaggttaagcaccatgccgacttgtgaacggattttcattttttcgcctcctgtacctgatcgcgacctttatcatccagccagttaacgttcttcatcttgcggatcatgatgaactcatcgcggttcgatccgacggtgccgtagtagttaaagccccaggccagctgcgcgtaaccgccaatcatatgcgttggtttcgggcaaacgcgggtaaccgagttatgaatgccgccgcgcatgccagttacttccgaaccaggaatattcataatgcgttcctgggcgtgatacatcatggtcatgcccggcggtacacgttggctgaccaccgcgcgggcagtcagcgcgccgttggcgttgaatacttccacccagtcgttatcgacaatggtcagttctcgggcatctgtttcgctgatccagacaatcggtccaccgcgagagagcgtcagcattagcaggttttcactgtaggttgagtgaatgccccatttctggtgcggcgtcaggaagttaagtgctttttccgggaagccgtttggcggtatctggcgcatctcactgacgctacgggtgtcgataggcgggcgataagccaccaggctttcaccaaaagcacgcatccacggatgatcctgatagagctgctggcgtcccgacagcgtgcgccacggaattaactcatgaacgttggtgtatcccgcgttataggagacgtgatcgctttccagaccggaccaggtggggctggagataattttacgcggctgcgcctgaatatcgcgaaagcgaatcttctcgtcctctttgtgcagcgccagatgggtatgttcgcgcccggtgatctcgcccagcgcctgccacgctttgactgcaacatgaccgttggtttccggtgccagtgccagaatcacttctgaagcgtcaatggcggtgtctatcagcggacgcccctgtgccgggccatcacgcttggtgtaattgagtttgccgaggaaatcgatttcatcctgggtattccacgaaatccctttaccgccattgccaagtttgtccatcaatggcccgagcgaggtaaagcgttcatacgtagcagggtagtcgcgctccaccgccacaatattcggcgcggttttgcctggaatcagatcgcattcgcctttgcgccagtcgagcacttcacacggctgtgagagctctgccggagagtcatgcagtaggggttgtaataccacgtcggtttctttgccaagatgacccacgcacacttgcgaaaatgctttggcgatacctttgtagatttcccagtcgctgcgtgattcccacgccggatcgaccgccgcagaaagcggatgaataaacggatgcatatccgaggtgttcatatcgtctttttcgtaccaggtggcggtgggcagaacgatatcggagaacaggcaggtactggacatgcggaagtcgagcgtcaccagcaggtcgagcttgccttcaatcgctgcagtttgccactcgacttcttccggtttgatcccgtcgctggcaccgagttcctcgccctgaatcccgctttcggtccccagcagatacttctgcatatactcgtggcctttgccggaggagccaagcaggttagagcgccagacaaacaaattacgcggatgattgctgctgctatctggttgttcgcaggccatacgtaaatcgcccgatttcagcgcctgggcggtaaattctgtgggggataatccggccttgtcggcttcagctttaatcccgagcgggttacgccccagctgcggcgcagaaggtagccagcccatacgttcggcgcgaacgttgaaatcaatcagatgaccgctgtacttactggcatcggcgagcggtgaaagtaactcctgagcagagactttttcatagcgccattggctggaatgattgtagaaaaacgaggtgctgttcatttggcgcggtggtcggttccagtcgagcgcaaaggccagtggcaaccagccggtttgtgggcgcagtttttcctggccgacatagtgtgcccagccgccaccgctttgcccgacacaaccgcagaagatcagcatattgatcatcccgcggtagttcatgtccatgtgataccagtggttaacacctgcgccgaggataatcatcgagcgcccatgcgttttatgggcggtatcggcaaattcacgggcgatggtttcaatatactggcgcggcacgccggtaatttgctcaccccaggctggggtgtacggtttgatttcagcgtaatctttcgcactgttttcatcttccagcccgcgatcgaggccgtaattcgccagtaccaaatcataaacgctgaccaccggacaggtgttgccatcgactaacgtcaggtttttaacgggcaattggcgcaccagcaccggattgtgttttacgctgcgaaaatgcggattttcaatgccgccaaagtaggggaaggccacgcctgcaacagcgtcatgttgaccgagcagggttaacgacaattcggtttccgtaccggcggcaatggattccagattccatttgcctttttctccccagcggaaaccaatcgaaccgttcggcactaccaattcacctgcggtattaactgctacggttttccactgcggattgttgctttcgcccagtccatccaccaggtcagatgcgcggatcatgcgcccgggaacgtagctaccatcgtcgcgaggctccagcattaccagcatcggcatgtcgctgtagcggcggcagtagttgataaagtagtcgctgggattatcgagatgaaactcttttaaaatcacatggcccattgccatcgccagggcgctatcagtgccttgtttcggtgccagccactggtcgcacaatttggccacttcagagtagtcaggggtaatggcgatggttttagtgcctttgtagcgtacttcggtaaagaagtgggcgtccggcgtacgtgtctgcggtacgttagacccccaggcgatgatgtagctggagttataccagtcggcagattccggtacgtcggtttgctcgccccaggtcatcggcgaggcgggcggcaggtcgcaataccagtcgtagaaacttaaacaggtgccgccaagcagcgacagataacgcgttccggcggcgtaagaaaccatcgacatcgccgggatcggcgagaaaccggcaacgcgatccgggccgtaggttttgatggtccagacgttagcggcggcaatcagctggtttagttcctgccagttggagcggataaacccgccgcgcccacgcacttgtttgtagctcaggcacttttgcggatcgttcataatcgatgcccacgccagtaccggatcgctgtgttgcttgagggcttcgcgccacagttcaatcagtcgtttacgaatgagcgggtatttcaggcggttagcgctgtaaagataccaggagtaacttgcgccacgcgggcagccgcgaggttcatgattgggcaggtcagggcgagtgcgcgggtagtcggtctgttggatttcccaggtcaccagaccatttttaacgtagattttccagctacaggagcctgtacagttaacaccgtgggtggaacgcacgattttgtcgaactgccaacgctggcgatagctgtcctcccagtcgcggttgctatgcatcacctgtccgtgaccatcggcaaaggtttcgcccttttgtttgaagtagcgaaagcgatccaaaagtttactcatgacatgactcctgctccaggaatgaattgggatctgatgccttgtcggatgcgacacggttgtacatcaggcatcgatctcttatttttggctgaacttccgccgaccataaaccagccaggtcagcagcacacaaacgatgtagaagattaaaaacactttcatcgcgccgaccggagagccggtcatattgagcgacatgccaaacgcctgcggaataaaaaagccgcccactgcgccaatggctgagataaagcccagagccgccgccgtttcggtgacggcttctttctgagcttgctcatcactaccgcctttcatctttacccgataaatggttatctggcgaaagatgacggcgatcatctggaaagtagaaccacttcccagacccgcagtcagaaacagccccataaatacggcgtaaaaggcgatgaaattaccggagcctgtgcccggtaaggtaaggaacagcagggcactgaaaatcgccataaaaataaagttgatcaacgtcacccgcacgccgccgaacttatcggaaatagcaccaccaaccgaccgcgcgatggcaccgataaatgggccaaagaacgccaggcgcagaatattcacatccgggaactgggtttttgccagcatggcaaaacccgcagaaaaaccgataaacgaaccgaaggtggcaaggtaaagcaggctcagcagccagagatgcaggcgttgtaagacagggagctggtcggcaattgaggcgcgtgaactggcgatatcattcatccctgaccatgcggcgatcgtggcaatcgccagtagcggtacccaaatccatgcggcattcgccagcgacatcaccgaaccgtcggcctgcggtacgccattgacgccgagaaaggcaaatacaggtacaaaaatgaccagcggtgcaaccagctgcattacacttacacctaagtttcctaatccgccattaatcccaagagcgctcccttgtttggcttttggaaagaagaaactgatattgcccatgctcgaagcaaagtttgcacctgcaaaaccgcatagcaaagcgataacgataaatatcccaaaaggagtattcggattttgcacggcaattccgagccagacgcaaggaataatcaggattgcagtactaaaaaccgtccatcggcgtccaccgaatataggcaccataaaggagtagggaacacgcaataatgcgccagaaacggagggtaatgcggttaataaaaagagttgatcggtagtaaaattaaaaccgattttattgagattaacggtaactgcgctaaatagcatccagacacagaaggcaagaagtagacaactgactgatatccagagatttcttcgagcaatatgttttcctttattttcccagaaggccggattttctggtttccagtcgcgcaaaagataacgactatttttctcattttgcagtgccatattgttcctcacatgcacacattggtaatgaaaaaaagacaaaacacgaggtaaggcgcaatagccagttattagaattaaggatgaattgggtgaagtgctgattgaaagaatagataagaaagcgtaaccgcgggggcagaatggggattaagtagccagatatgtgttactaaatgtaactaacaagctaaccttcaaacggggttaatctttgaacgtatgtcatgtttcaacccttcagatcgtgaatctaaagggttacatattaactatattatcaacaagaccagacacttatagaattagtgatgatttattcactaaaaaggccatgaactggaggaaaacgatctgtccagaaggtctatcggttcctctcttattgcctgattgtaataatcgttattacagtaagtattgtttatttcatctaaggtcatgtttttaacttttatattcctctggtttacaacttcctctgtcttgtaagtgtgtatattatatggggtatatgcttttttaataggatagtgaaacaattcgttatccacatctattccgtcagagtgaacttcaaatgcaccaggcgaaagaattgccaggccagtattaagcttaagtgctggggaaaacaaattaaataacatgagctgcatagtagggcaattgttcttcccagaaacatttaaaaaatttaagttttgctctgttttattatggggaataaagttccaatatcggatgtattattagtatcaatgtgggttattttattattgtccagtcttaaacttttgatagatggaagataagtcaggaaatcaagatttatatatttcaactggttgttagcagcgtttaatgtctgaacattgcagaagttgctatagaatattttaatttcagaaagcaaattgttgttaataagtaacgtattcaagttgggaaataagtcattgtgtaaacttgttagtttattatgggatagatccagcagtaagagttcatttttattacctgcaacaatatcagttaattgattatggctgagattcaggtattgcagccattcgcaagattctaattgcacaaactctagttgattatgtgccgcactaaaataagtaactgatgaaagcctatctatatcaatatttctgagagcattattattcatagatatatgtgtaatacttacatttctgccttgaggaaaatttattgactcaagagcattactattcagacttagctttacgagtctatcgtagttggttgcatcaaaatgtgtgagttggttattatcaagattgatagatgtgaagttttgcagccctggtggttgagtggttaaattaagtcctgataaatcaatggtcacttcattagtgtcatcaattatatttcttactgcagtccagtactgcatttgtgcaagtggatcattgttgatgccgttaactaatacatgccaaagatgttttgatgatattagttgatcaatgtcattggttggcagtaaattgttattgcttaagtttaaatattccagttttgtagtgtttttggcgtttaaatgtgcaatatggttgtcgtttaaagtgattgttttcatcctgggatgattgtgtaatataaggtcagtgatcatattgtgatgggcacttaactcaatcagagattcttgccgcgcgagccgttggcttcatcgttatagcctttaaaatcatattcccagtgaccaaaaccaatcatttgatcattgatttgcgtttctcctttaaagccgagacgggcataagttttatcaccatcgtcacgcttatcatcagtaaaataacgtagagcggtaaccttgccataaaggtcgagtttattaccatccttgttatagacttcggcagcgtgtgctacgttcgcagctaacaaaccagttacaaccaccgcaactatttttaatttcatttaacagaatccttttaattatcgttaaacgtattttctaaacgaattttaaacggcgtcatttataagtgacatactgtttttaaaatagaatggtgattaaaaacaatgagaaaaatagatgaaataatattatttgtcgatatgtgatcgaagtcgaaatgagatataaggtgaattactggtatttgatatttatttttttaatattgtcggaatttatctgattaactaccgggccgtagacccggcagttattttaaccacgacgtgtcgccagccagcagagcagggaaccgccgcagaccatcagcgcgccttgccagaacgagaacgacagcggggcgctgagcagcacggctgcaagcgctgaggaaagtacaggcgtaaaatacgaacctaccgccataatggtgacattgccatgcaatataccgacattccatgcagcataagcaaatcctaaggtaaatgccgcagagatgagtttaatcatgacgggcgtgctaaatatcatttctggttgtggcgtaagaaaatagtaaacccacagacttgctcccgttagcaggacaaaaacggtaattccattaaatccgcgtgcgtatttattcgttactgtgcaataggctgcccagataaacgcaccaatgaacgccaggaaataactcaatgggctggtggtgatattattgatgatttcatcataatgtaacccattgtcaccgcctaacacccaacagacgccgacgagggctaataataatccaggtacaatcaaccagttggttttctgaccattaaacagaatggcaaagagaattgtcaggctgggccacagatagttcaccatacccacttcaatcgcctgatgatgggtcgccgcataccctaaggaaagcgccagacagatttcatagctgacgaataacagactcccggcgagtaaatagcctttcgggatttgccgaatacgcggaaatccaaccgtgaagattaacagcagcccgcttaatgaatagatagcagctgcgccgccgaccgggccgagcccctcactgacaccgcgaatcaatcctaccatcgtgctccacaggacgatcgctatcagccctatgagcgttgctttttgtcgtgtcatgctcgctgttttgtctctcttgccgttaaaaattaagctgaattttatagcatttttttaactggcctgtcaggcagtggtgcgtttttctaccgctattgaggtaggtcaatttgcgaaggcggattattttgtggcaaacagatgttctttttgatttcgcgcaaaaagattcagaattttactgttagtttcctcgcgcagtaatacccctgaaaaaagaggaaagcaatggacgtcagtcgcagacaattttttaaaatctgcgcgggcggtatggctggaacaacagtagcggcattgggctttgccccgaagcaagcactggctcaggcgcgaaactacaaattattacgcgctaaagagatccgtaacacctgcacatactgttccgtaggttgcgggctattgatgtatagcctgggtgatggcgcaaaaaacgccagagaagcgatttatcacattgaaggtgacccggatcatccggtaagccgtggtgcgctgtgcccgaaaggggccggtttgctggattacgtcaacagtgaaaaccgtctgcgctacccggaatatcgtgcgccaggttctgacaaatggcagcgcattagctgggaagaagcattctcccgtattgcgaagctgatgaaagctgaccgtgacgctaactttattgaaaagaacgagcagggcgtaacggtaaaccgttggctttctaccggtatgctgtgtgcctccggtgccagcaacgaaaccgggatgctgacccagaaatttgcccgctccctcgggatgctggcggtagacaaccaggcgcgcgtctgacacggaccaacggtagcaagtcttgctccaacatttggtcgcggtgcgatgaccaaccactgggtggatatcaaaaacgctaacgtcgtgatggtgatgggcggtaacgctgctgaagcgcatcccgtcggtttccgctgggcgatggaagcgaaaaacaacaacgacgcaaccttgatcgttgtcgatccccgttttacgcgtaccgcttctgtggcggatatttacacgcctattcgttccggtacggacattacgttcctgtctggcgttttgcgctacctgatcgaaaacaacaaaatcaacgccgaatacgttaagcattacaccaacgccagcctgctggtgcgtgatgattttgctttcgaagacggtctgttcagcggctacgacgctgaaaaacgtcaatacgataaatcgtcctggaactatcagttcgatgaaaacggctatgcgaaacgcgatgaaacactgactcatccgcgctgtgtgtggaacctgctgaaagagcacgtttcccgctacacgccggacgtcgttgaaaacatctgcggtacgccaaaagccgacttcctgaaagtgtgtgaagtgctggcctccaccagcgcaccggatcgcacaaccaccttcctgtacgcgctgggctggacgcagcacactgtgggtgcgcagaacatccgtactatggcgatgatccagttgctgctcggtaacatgggtatggccggtggcggcgtgaacgcattgcgtggtcactccaacattcagggcttgactgacttaggcctgctctctaccagcctgccaggttatctgacgctgccgtcagaaaaacaggttgatttgcagtcgtatctggaagcgaacacgccgaaagcgacgctggctgatcaggtgaactactggagcaactatccgaagtacttcgttagcctgatgaaatctttctatggcgatgccgcgcagaaagagaacaactggggctatgactggctgccgaagtgggaccagacctacgacgtcatcaagtatttcaacatgatggatgaaggcaaagtcaccggttatttctgccagggctttaacccggttgcgtccttcccggacaaaaacaaagtggtgagctgcctgagcaagctgaagtacatggtggttatcgatccgctggtgactgaaacctctaccttctggcagaaccacggtgagtcgaacgatgtcgatccggcgtctattcagactgaagtattccgtctgccttcgacctgctttgctgaagaagatggttctatcgctaactccggtcgctggttgcagtggcactggaaaggtcaggacgcgccgggcgaagcgcgtaacgacggtgaaattctggcgggtatctaccatcatctgcgcgagctgtaccaggccgaaggtggtaaaggcgtagaaccgctgatgaagatgagctggaactacaagcagccgcacgaaccgcaatctgacgaagtggcaaaagagaacaacggctatgcgctggaagatctctatgacgcaaatggcgtgctgattgcgaagaaaggtcagttgctgagtagctttgcgcatctgcgtgatgacggtacaaccgcatcttcttgctggatctacaccggtagctggacagagcagggcaaccagatggctaaccgcgataactccgacccgtccggtctggggaatacgcttggatgggcctgggcgtggccgctcaaccgtcgcgtgctgtacaaccgtgcttcggcggatatcaacggtaaaccgtgggatccgaaacggatgctgatccagtggaacggcagcaagtggacgggtaacgatattcctgacttcggcaatgccgcaccgggtacgccaaccgggccgtttatcatgcagccggaagggatgggacgcctgtttgccatcaacaaaatggcggaaggtccgttcccggaacactacgagccgattgaaacgccgctgggcactaacccgctgcatccgaacgtggtgtctaacccggttgttcgtctgtatgaacaagacgcgctgcggatgggtaaaaaagagcagttcccgtatgtgggtacgacctatcgtctgaccgagcacttccacacctggaccaagcacgcattgctcaacgcaattgctcagccggaacagtttgtggaaatcagcgaaacgctggcggcggcgaaaggcattaataatggcgatcgtgtcactgtctcaagcaaacgtggctttatccgcgcggtggcagtggtaacgcgccgtctgaagccgctgaatgtaaacggtcagcaggttgaaacggtgggtattccaatccactggggctttgagggtgtcgcgcgtaaaggttatatcgctaacactctgacgccgaatgtcggtgatgcaaactcgcaaacgccggaatataaagcgttcttagtcaacatcgagaaggcgtaagggggcgaacagatggctatggaaacgcaggacattatcaaaaggtccgcaactaactccatcacgccgccttctcaggtgcgtgattacaaagcagaagtcgcaaaacttatcgacgtttccacctgtatcggttgtaaagcctgtcaggtggcgtgttcggagtggaacgacatccgtgatgaagtggggcactgcgtcggggtttacgataaccccgccgatctgagcgccaagtcctggacggtgatgcgctttagcgaaaccgaacagaacggcaagctggagtggctgatccgtaaagacggctgtatgcactgtgaagatccgggctgccttaaggcgtgcccgtctgctggtgcaatcattcagtacgctaacgggattgtcgatttccagtcggaaaactgcatcggctgtggttactgcattgccgggtgtccgtttaatattccgcgcctcaacaaagaggataaccgggtatataaatgcacgctctgcgtcgatcgcgtcagcgtcggccaggaaccggcttgtgtgaaaacctgtccgaccggggctatccacttcggcaccaagaaggagatgctggagctggcggaacagcgcgtggcgaaactgaaagcgcgtggttacgaacatgctggcgtctacaacccggaaggggtcggtggtacgcacgttatgtacgtgctgcatcacgccgatcagccggagctgtatcacggtctgccgaaagatccgaagatcgacacctcggtaagcctgtggaaaggcgcgttgaaaccgctggcagcggctggctttattgccacttttgccgggttgattttccactacatcggtattggcccgaataaggaagtggacgatgacgaggaggatcatcatgagtaagtcgaaaatgattgtgcgcaccaaatttattgatcgcgcctgtcactggaccgtggtgatttgcttcttcctggtggcgctgtccgggatttcgttcttcttcccgacgctgcaatggctgacgcaaaccttcggtacgccgcagatgggacgcattttgcacccgttcttcggcattgcgattttcgtcgcactgatgtttatgtttgtgcgttttgtgcatcacaacatcccggataagaaagatattccgtggctgttgaacattgtcgaagtattgaaaggcaatgagcataaagtggcggatgtcggtaagtacaacgccgggcaaaagatgatgttctggtcgatcatgagcatgattttcgtgctgctggtgaccggggtgattatctggcgtccgtactttgcgcagtacttcccgatgcaggttgttcgctacagcctgctgatccacgcggctgcgggtatcatcctgatccacgccatcctgatccatatgtatatggcattttgggtgaaaggatcgattaaagggatgatcgaagggaaggtaagtcgtcgctgggcgaagaaacaccatccgcgctggtatcgtgaaatcgagaaggcagaagcgaaaaaagagagtgaagaagggatataatctcttttgaactttaagctgaaaatggcgctgtaaaaggcgccattttcatattgtagacaacgtaggctttgttcatgccggatgcggcgtgaacgccttatccggcatgaaaacccttcaaatccaatagattgcagtgaacgtgtaggcctgataagcgtagcgcatcaggcaatgttgcgtttgtcatcagttctaaatggcgctttataaagtgccatttttttattgcgtaaccagacggcgtaatcgcgacacatccactgttttttctgcctctgccagactccaggcgttttgcagattcagccacatttgcggcgaactgccgatcaccacggaaagtttaatcgccatttctggcgtcaaagctgcttttcctgtcagcaatcggcttgccgttgagggagcaatttccattgctctggcaaactcgcgcaggctgacattaagttcgtccagtgattcctgaataatgtcccccgggcggggatgattggccattttcattagtgtctttactctcagtagcgttccttcactgggaacactatcattattgttccttcctacgcaacaataatccatttagccatttcatgttggagagtgtgcgatgctgcgacccgaacatggcagtcgcagcaaaggcctcttagtgacggaaatcaatcaccatgcggccacggattttgccttcttccatctcagtaaagatggtgttgatgtccgctaacggacgcagggcgactttcggcaccactttaccttcggcggcaaactggaaggcttcagttaaatcctggcgcgtgccgaccagcgaaccaaccacttcaataccatccagcacaagacgtgggatatccaggctcatagactccggcggtagaccgacagccacaacacgaccgcctgcacggacagcatcaactgccgagttaaacgcagctttagctaccgctgttaccaccgcagcgtgagcgccaccagttttctcctgcacaattttggcggcgtcttcggtgtgtgagttaatcgctaaatctgcgcccatttcggttgccagttttaactgctcatcattgacatcaatggcgatcactttggcgttaaagacattcttcgcgtattgcagggcgaggttacccagaccgccaagaccgtagatagcaatccactgccctggacgaatttttgacagcttaacggctttgtaggtggtgacccccgcacaggtaatgctgctggccgccgccgagtccagaccatctggcacttttaccgcgtaatcggcgaccacgatgcactcttccgccatcccgccatcaacgctgtatccggcatttttaactgaacggcagagcgtttcgttaccactgttacagtattcgcaatgaccgcatccttcgtaaaaccacgccacgctggcacgatcgcctggttttaatgaggtgacacctgggccaacttctgccaccacaccgatgccttcatggcccagaattacgccggttttgtcaccaaaatcgccattcttaacatgaagatcggtatgacatacaccacaacactccattttcagcagggcttcgccatgtttcagtgagcgcagtgttttatacgtaacgtcaacatgatgatccttcgtaacaactgcagccttcatagttcctccttttcggatgatgttctgcatagcaggtgaggcaaatgagatttattcgccactacccagtatggatgagatctgaaaaaagggagagggaaatagcccggtagccttcactaccgggcgcaggcttagatggaggtacggcggtagtcgcggtattcggcttgccagaaattatcgtcaatggcctgttgcagggcttcggcagaggttttcaccgccacgccttgctgctgcgccattttgccaaccgcaaacgcaattgcgcgggagactttctgaatatctttcagttccggcagtaccataccttcgccgttcagcaccaatggtgaatactgcgccagcgtttcacttgctgacatcagcatctcatcggtgatacgtgacgcgccggaagcaataacacccagaccgatgcccgggaaaataaaggcgttgttacactgggcgatagggtagattttatctttccataccactggattaaacgggctgccagtggcgaccagcgcgttaccttcggtccaggcgataatgtcctgcggtgtggcttccacgcgtgacgtcgggttagacagcggcatcacgatcggacgcggacagtgtttatgcatctcacggatgatctcttccgtaaacagcccggtctgtcctgagacgccaatcagaatatctggttttacattgcgcaccacatccagcagtgacagcacatcgctgtcggtatcccagtcactgaggttttcgcgtttctgcaccagtttggtctggaaaggcagcaggttcggcatcttgtcggtcagcaagccaaagcgatcgaccataaagactttctgccgcgccgcttcctcgcttaatccttcgcgctgggtctgggcgatgatcatttcggcaatgccgcatcccgctgaacctgcaccaaggaagacgatttttttctcgcttaactgaccacctgccgctcggcttgctgcgatcagtgtgccgactgttaccgccgcagtgccctgaatgtcatcgttaaaagaacaaatttcattgcgatagcggttaagtaacggcatcgcatttttttgagcaaagtcttcaaactgcaacagcacgtctggccagcgttgtttcacagcctggataaattcatcaacgaattcatagtattcgtcgtcagtgatacgcggattacgccagcccatatacagcggatcgttaagcagctgttggttgttcgttccgacatccagcaccaccggaagggtatacgccgggctgatgccgccacaggcggtatagagcgacagtttaccgatcggaatgcccatcccgccgatgccctggtcaccaagccccagaatacgttcaccgtcagtcaccacaatcactttaatattatggttcggcacgttttgcagaatatcgtccatattgtgccggttctggtaagagataaacacgccgcgtgaacggcggtagatctcagaaaaacgctcacaggctgcgccgacggttggggtataaataacaggcatcatctcatcaagatgattgtttaccagacggtagaagagggtttcgttagtgtcctggatgttacgcaggtagatgtgtttgtcgatttcggttttgaatccctgatactggatccatgctcgttccgcttgttcttcgatggtttcgaccacttccggcagtaaccccagcaggttgaagttacggcgttcttccatgctgaaggcactgcctttattcaacaacggaaattccagcagtacagggccagcgtaagggatataaagcgaacgctgtttttttgtttttggttccatgtcactcactcttttttgaatatccatccctggggggcttttatcgtctttgctttaccgccagggcgtcggcctcaagtataaagcagataaaaacaaaaacaccattgcgcaggcaatggtgtttaatcgtcattgaggactgatggttatgaattacttttcagcggggcgttttctgccggttgggttatttactacgctggatttgtcaccttcggtaactattttgcgctggttagaaattttatggtccagtccaagaatatgacgtgcctgacggttcgatttcattttaactcctcaatcctgtagctagttttaaggacaacatcgccgtagcgaagaaacacgtgctaaacccctaaattaggttgccgatcaagcatagcaccttaaagcgtagggtgctggccactgaccacataattgatcgtttgctggtagatatcactgaggatgtcgttatcagaagcttcaacccatttggtcagctccatgagaatgtcatcttcagtgacaacaccatgctgtgcccgaaggccttgctcaatggcattaaccagagcgggttctgctgttgaattttctgcctgataataagtaaacatagtgattctccgtgtctgtgtatttatggtgtctgctacggatcgcagatttataaagcacattcagcatggcaaatatttgccgcttcgttgttaagattagtcctggttgatgatttttatattttaacaccatgatattcatagggattgtgattggtatgatccgattaatattgatacaatatcttttgggttatatattcccggtaatctattgtgggaatttaatttaagtgcagaagtaatcttttcgccggattttattcggaatatcctgcttatcctcgtgctgtttctcacgtagtctataatttcctttttaagcccacaggagagcaacaatgacaatccataagaaaggtcaggcacactgggaaggcgatatcaaacgcgggaagggaacagtatccaccgagagtggcgtgctgaaccaacagccgtatggatttaacacgcgttttgaaggcgaaaaaggaaccaaccctgaagaactgattggcgcagcgcatgccgcatgtttctcaatggcgctttcattaatgctgggggaagcgggattcacgccaacatcgattgataccaccgccgatgtgtcgctggataaagtggatgccggttttgcgattacgaaaatcgcactgaagagtgaagttgcggtgccgggtattgatgcctctacctttgacggcataatccagaaagcaaaagcaggatgcccggtctctcaggtactgaaagcggaaattacgctggattaccagttgaaatcgtaaagcattgccggatgacgcgtcaggcgcgtgaatgcctgatgcgttgttagcatctctacagcgcccgccagcaccggagctcacgtccgtcctcccttattgctaatgattgccggacttcacatccgtgggttgccagcgggcaacgttcgtagaaaaaacagccttgcggcaacgtgcggtttcccggcagatccgttttacgtaatgcccattcttcctccagcggtttatcaatggcggggagggaatccagcaataatcgggtgtatggatgtgcaggtgccgtcagcacctgctgcgcgtcgcccagttctacaatctgcccgagatacatcaccgccacccgatcgctcatatgacgtatcaccgagacattgtgtgaaatcagcacataggtcagcccgtgattttcctgtagcgttaccagtaaattgaggatctgcgcctgaacggagatatccagcgcagaggttggctcatcaagcacaatcacgtcaggctgcgaagagagtgctctggcaatggcgatacgttgccgctgcccgccggagaacgcatgaggcaggcggtcgagatactccggacgaatacccacctgcacagccaactcctctgccaacgctcgccgctgttgttcactactacgcttagctatccagagcggttctgtgatgatgcgccacaccggtaagcgcggattaagcgaagagagcgggtcctgaaacaccatctgcataatgcgttgtgagccagaacggatgtactgcccgtggctcggttgcagcatacccattaaaagctgtgcgagggtgcttttgccgcagcctgactcgccgacgatccctaaggtttcaccacggcggatctgtaaatcaataccattaatcacatgaacatgttccgtagttttaccaagccagtttttacgggccgggaaattgatatggacgtcgcgtaacgttaataacgtgtcagacacttatgacctcctgctgcggataccaacaggcgcagcgctggttgttgtcaccacacgctgtcagcgccgggacgttttcacactgtgcacctgccgcataacaacgatcgcgaaaagcgcagccgtcaggcaaatgggtgagatttggtaccgtccctggaatggcgggtaatggctggcgcggtattccatgttctggtgcgcattgcagcaaaccaatggtatacggatgccggggatgatggataacgtctgccgtcacgccgctctcaatcacgcttccggcatacatcacgtaaacgctatcgcacagttgcgacaccacggccatatcatggctgatgaacagcaccgcagttccactggctcgagctttatgtttaagcaaacgcagtacctgcaactgtaccgtgacgtccagcgccgtagtcggttcgtcggcaataatcaattgcggctcgcaggagaatgccagcgcaatcattacccgctggcgcataccacctgaaagctcaaacggatagcgcgacataacttccacggcatccgggatttgcatctcttccagcaggtcaatcgctttagctctggcttcccgacgacttattggttgatgatggcggatcacgtccatcatctgaagacctattcgacgtgtcggattgagggcggtcatcggttcctgaaagatcatcgccactcgtgcgccgcgccactgacgaagctgtttttcccgcgcgttaagaacatcttctcccagcagggaaatctgcccccgatgtacgcaataactgcccgtcggtagcagacgcataatcagcattgcggtgactgatttacctgagccggattctcccaccagaccgacaatttcaccgcggttaatctgcaaggacacattgttgagcgcgtgaacatcaccgttaaaaccggggaaactcaaatgcagttgttgaatgtccagaacgggttgggtcatgactgctttcctcctgctttcgggtcaagcagatcgcgaataccatcaccaaagagattaaacccgacggcggtaagcaaaatcgctgcccccggaaatgcgcaataccaccactgatcgagtacatagttgcgaccatttgctaccatcgcgccccattcagcactcggttgttgagcacctaggccaataaatcccaacgtggcggccattaaaatcgcgctaccgatatccagcgatgcctgcacgatcagcggcggcagggaattacgtaaaatatgccagctgatcagatgccaacgcgacgcgccaaaggttttcgccgcctgaacataggtatactggcgtacaactaatgcttgcccccgcgccaggcgcacataaaacggaattcgcactatagcaatcgccagcatggcgttaaacaaactcggcccgagagcggcagccagtgccattgtcagtaccaacgaaggaatcgacagcataatgtccatgatgcgcatgatgatggcgtctgcgcgtccgccaagcacaccggatagacatccgagtagcgaaccaatcatacccgcaatggcaactacgactaatccggcgagaattgattgctgactgccgaccagtacgcggctaaacagatcgcgtcccacttcatcggtgccaaaccagtgcgccgcagaaggcggcaaaaggcgggtggttaaatcaatggcgttgggatcatgcgtcgccagccacggtgaaaaaatcatcatcagtagcattaatacaatgatgactgcgccggtcacggtgagcggactgcctttcagcatccataccagttttgcaccgttaaatcgcgtttgtttttgtgggcgtacggcggacgtttcctcgcttagcatcattcaccacctccacgtccgatacgcggatcaatccacaaatagagcaaatccaccaccaggttgaccagcacataagcaaatgaaaccacgacggcaaagcccatcactgccgggaagtcgagcgcctgtattgatgttactacccatgcacccattccgggccaggcaaaaacggtttcggtgagcactgcgccatacaacaaatcgcccagcgccaaacccaatacggtaatcgatgggatcaacgcattgggtagcgcataacataaaacgatataccagccgggcaagccgctggcccgggcggtacgaatgtagtcttcactcaattgttccagcatcgctgagcggatctggcgagcgacaattcccaggtgaacgaacgccagcgttaatgccggtaagatgagatgttgcaacgcattgaagaagacttcaccgttgccttcaagcagcgcatcgagcagataaaagccggtaacgtgcgttggtggatccagccagtcatcaagccttccgccgccgggaagaatttgcagatgaccataaaacagcacaatgacgcccagcccaagccagaacgcaggtgtggagattccggtaatggccattattcgcaccagatgatccagccagcgatttcgccagactgcagagagtatgcccagcgggatgccaatcaggagtgccagcagcagggcaccaaaagccagttccagcgtcgccgggaaaaatatacgcaactcttccagcaccggacgcccggtacgaatggatgttcccaggtcaccatgaaacaggtcgctgacgtagcggtaaaactgtacatacagtggctggtccagtcccagttgctggcgaatattttccacgatagcatcgctggcgcggtcacccgccagtaaccgcgccggatcgccagggatcagatgcgagataataaacgtaatcacgcagacgcccgccaccacgagcaccagcccccagcagcgttggcgtaaaatactccagaaggtcacgttatttactcatggtattgatattgaagacctgttccagcatgggattgaacacaaagcctttcacctctttgttcatcgccagttggtagtttttctggaacaggtacacataagcagcgtcatcaatgacgattttctgtgcctgctggtagtcccgggtacgctgcgtctggtcggtggtcgcaagcgcattgcgcagtaacttatcgacctcactgttttcatagaacgagcggttacccggcagaccttttttgtctgactcaaaccagtaattcataaacatatacgggtcggcaaaatccggactccagttgccaatcgcaatgtcgtaatcacctttactcactctgtcgcgcatggtggcgttcgccagcttttccagcttcacattgatgcccagcttgttgagactggattgtgtcaccagagcaataggctcccagttcggatcgttatcggagtagagaaacgtcaggctggtgggtttgctcgtcactttatcccattcggctttggctttcgtttcgtcatggttgtattgcattgccgtcgcatcgtagccccacatgccttccggaatcgggccgcgcatctgttttccgttaccactcagaatgccgttaaccatgccctgataatcggtagaccaggaaatggcccgacgcagatccgcctgattaagtggcgctttgctgttattcagatacagataggtaacgcgcagtgacggatactctgccacattgactttattttcctgcttcagggcgttgagttgatccaccggcagcgcatcggcaatgtcaatgtcgccacgggagagctgcaggcgacgggaggcactttcaccaataatttttaccgatacccgtttgaagttcggtttattgcctgggtaatgcggatttggcaccagaactaattgctgacctttttgccagcttttcagcataaatggtccggaaccggcggtattttgcgcgaggaagccgcgagcatcatccgctgcatgttcctttaagaccgccggattgataatggatgcaccgtcattcgccagcgtgtagaggaacggtgcgaatggttggctaagggtaaacttcaccgtatgttcgtcgggagcatcaatctttaaatctttgggaaatgcttctgctggcccctggccgatttttagtagccgctcaaaagaaagttttactgcttcggcagtgacaggtgtgccatcggcaaatttagcattatctttcagggtgaacgtccactctttttgatcgtcagacgctttccagctacttgccagatcgccttcaacgtcggttgagcctttatcaccgtccgttttgtactgaaccagccgctgataagacgggtaggtcactgtccagtcgttattatctattgttaccgccgggtcgagggtttgtggatcggcggccttaccaatcaccagcatatcttttggtacggcggcgtgcgcaaccgggaaatttgtggcaaggacgagcgcgagcaatgtgggacgaaacgatatcgatctcttcatgacagtttcctgattaactgacgtgctgtgtgccaggggatataaaacaagagaattgatcagcgagcagagggtaactcgctgcctggggtaattcgaagtgccaccattcgctggagataccgacaaaaccgccaccagtcattatcgcattcagcaacagccgattgcgctgagcggcgggcgggacggaagggtgataggcatgggagcgctcgtgcatttcatcgaaccctgcgcccatatcgaggatgttcccgtgctcatcacgaagcgtcaggtcgatcgccgtgccacggctgtgattagaaccgaccgtcacatcaacaacatattgcgggtctgggcaggcttgccacaacatcgcctgtgcttgttgtgggcgatacgcatcgtaaatcaccagttgtaaccctgacagctgggcgatgctgatacttttcgccagcgcggtaatcgcatccttgtgtaacagacaacgcgcttgctgataaatagctttacctgtgatgttatcagcgcaggcgtatttcaattcgatctccagatcagggaagattacggctaaatcaaccagttcggtggtatccgacataaacggttcctgtataagacaaaaattgctgcgctttccgcttatgcagatctcatgccatgccgggataagcgccagaatgctggcttaaagttatattttttaacttttgataaacatttgtgcagcgtagtgcagttttggtgcaagaggggaagttaaggaaggaatctcccggaatcgtagctgaaatcacagtatttaagtgacagtgtcacgttaaatgaaaacccgcgagtgcgggcgagaggaatttgtcagattttcagcggtaacacgctgctcatccagcctggaatttcttcggcgggtagggggcgggaaaagaaatatccctgaataacgcgacagtggatcttgcgtagcatctcaaattgctctttggtttcgacgccttccgccacgacggttaaattgaggctttgcccaatgctggtaatggcttcaagtaaggcaaggatgcgtttttcggtcagacaacgatcgacaaaacttttgtcaattttgatttccgttaccggaagactgactaagcgggataatccggaaaagcccgtaccaaaatcatctaccgataagcccacgcccatatcacgcaggatctgaatgcgcttaaagatttcggtatcgtgttccatcatcatgctttccgtgatttctaccgtcagctggtggccgtcaataccccaggcgtgcattgcatcagacacctgattaggcagttgattactgcgaaagtgcagcgccgacaagttcacggataacgccgggatatgaatattctggctacgccattctgctaactgacggcaagcttccgcgatgacccagcgcccaatattttcgatttcaccaatctcttctgcgagaggaataaaccgtgaagggggcacatgaccatgcaggggatcgtgccagcgagcaagggcttcgatgccgtacagttcacccgtttctgcgaagatttgcggctggtaaaccagtttcagttggttattgctaatcgcttctttcagcgctgcgcctaaaaccaaacgctcttttaccatttcgttcatcgccgggctgaagaactgccagccgttaccgccattcttgcgaatataatccattgcattgtgagcagtggagagcaagtaatcgcggtttttacccaggtcgtagctgatgccaatactcaaggtaagcgggaagggtttatcgtcaatcattatcggcttgctgaccacattccgtagctcatcggcgatttgggtaatgttactgacgtcgttttcgaggctcacgaggacaaactgcgtaccttcgatacgacagagatactgatccggtttgagtttttcacgaaagcgattgaccacttccagcaatgcctgatcggcccacgcatagccaaggctatcaatcacatcctgaatatggtcaacaccgatgagatacaccacgggagagacggctttgtcgaccaggtcatcgaggtaattgtgcaggttattgcgatttggcagaccggtcatcggatcaaattggatgagttgttcaatatgctgacggcttttttcctgttccagcgccagcgcggccatatgctggctgatatctgccacgcgttcgataaaggcgctggtttctgctcctgacgaggttttaatttgcaggatccccgcaggcgcgccatcacgctgacgaatggtcgctgaccagctttgcgcattttgaatttctgcaccgtgggaagatgacgcccagtgtatcggcatcccgttgcgcagtgcgaacagcgaaacatgcgattcgttgagtacagattcgatgttacgacaaatgatttcccccatttcatgaaatggcgggctgctgcacatggcggcgagaatattgccttcaagctggcggatttgccgttcttcggtgatatccgagaaagtcattaccaggttctgcagatgcgcgagcacgtcataaaccgggctgatagaggctttaatccagattttttcaccggtgcgcgtcaacagcagaaattcgtcctgatcgcgggcggttttccatagcaactgttgtaaacgaatgcggttatcggcagggaattcaggaatgttcaggagtgtatcgggctgcataccgctggcttcgctaatgcagtaaccaaacatttcggtaaatgcgcgattgcactgcacaatatggcgttccggatcgaggacaatcaccggtcggtcgagatggtcaacggcaataatcaattgtcgggtctgttctttttgcgccatttctacgctggcatcccgtaccagcgccaggtaataaactttcccctcggcgctcactttcgatagcgcaaaacgggtccagattttactgccgtcttttttctccagctgcagctcccgactcatcccctcgacgcgcgctttaccgccttcacggttgtgacgaatatattcaggatgcgcaggacgcaaatcccgcggaatcagcatatcaatgttattgccaatgacttcttcacgtttgtacccccagagcttctctgcggcggggttgaaaaacatcacttcatcattttcgttaattaacaccgcacccatcatattttgctcaagggcggggaaaaaaatgccatcggcggcattatccgcatcggttagcttcatgattacctctgcatcctggcgcatctaaagactggctttccagagttcaacacggtttctacctcgtcttttggcgatatacagagcttcatcggctatttgaatgaggcgctcatagtcaggatgaccattaaacatggcggcaccgatggaaagtgagagggcaatatcctcgccgtttgcggctttcagtttggttttctccacccgactgcgaatacgttctgcggtacgtaacgtttcgttttcagaagcttcagtcaaaacaatgataaattcatcgcccccgtagcggaaaacataatcactactgcggacgttgtcataaaaggcctgagagactttacgcagaatttcatcgccagtgttatggccccacgtatcgttgatctctttgaatttatcaacgtcaataatcagcactgacagcggtgtaccggtccggttggcatgggcaatttcgcgtttgaagatagtcggcaggaaacggcggttaagtaatttcgtcagtacatccataccgacttcgtggcgcgatacttcttcaaacaattcacgcagcaaggtaataatttgcgatacggtatttcttatctgtaataaaaatttcacccgcagacttctgttattcaaattcctggtgttacgcatggtttgattgaaaataccgtcgaaatcctgaatcagacgggagatatggcctacttcggcaatgccactaaaataatgtcgacctttatggttaaaccacagaccaaaatcagcctggcttaaaggcaaactactgcctaaatcagaatccagcaggattttatagataatatctatttcccatgaaagtattgaggctatttgccgttctttttcttcttcggcgttttccagtaacgagaagatacgatagttttcatcttcctttgaggcactactgtcactaaaggtaaacgcgcgagtcatcacttccatcgcgatatcaatactgttaatcgagaaatggtagacctgaagtttttctgcggcggaataatccgaagagaagatcaccggatagaggatttttttcagcacccgaaaccccatctcgacaatttctaccggaattcctatgcgggcatgcacttccgcgacggtatgctggatttgtattagcctttcgacatcgtcaacctgggcagaaagcacgttaataatccagcgttccatcgcactcttcaactgccgctcaacttgttcattactcaagaattcttcggcatgcgggtcgatgcggacaattcgataaaactcgatactcagataatgagcatgcgcaacggcaatttccgcggctttagcacgaatgggcggatctgcctgttcgacaagtccggtccactcatctttcattcttttaaaatacatctccataattcacacccttataaggctgggaaatcagacggaatcaaaatgaaacgcaacgtgcgagatcgactaactgcaccatattctcctgaaatatgaagatatactgaaaagaaataagcgatttaggacagtttcaatctacgctactgttcttcagaagagtatagcccatcgtaattatttttcggtgacagcgaatatcgtatggtttttcatattcatacatttttattagggatttatggctgtttaactaagtgtggttaatttgacttaagtaagcatgattattagtgggatagtttaagagggtaacaagccggtgggtaaagcaccggcttgttacaaagtaagaatgggagtttaactgccccagcgactttgcagatagctgaccgcttgttgagtctgcggtttattcagatagtcctcacggaacaagatggtgccgctaatttcgggcacagcatcgttaagatcgagctgctttttcagttccggtacgccgccgttaatcatccagtctggctctatctttgaaggttcacccactttatagaaggcgataccgatatacaggcgggtcctggtcggtttaacgacatccgcccaccattttgccaacacgtcataacgcgcggcactccgtgagaacggccagtaaatttggggagcaatgtaatccagcaatccttgttccacccatcgacgggtgtcagcgtaggattcgtcataggctgccgcgcctcgggtatcggaaccgagcggatcgtgtgatcggttacgccacacgcctgccgggctaacaccaaattcgactcccggcttaatgcttttaatggtgtgcgatacctttgcaattaactgctgagtattgttgcgccgccagtctgcttttgacgcaaatgcgcctccgtatttacggtacgtttcgttatcatttagccgtgaacccggtgactccgtatagaaatagtcgtcaaactgcacgccatctacgggatagcgggaaaccacttctgcgactattgatgtgatccagtcctgaacctcagggatgcccgggtcgaggacaaagcgatcgccagacgttctgatccagtcgcggtgttgcacatagacgctcgccggttgttgagacagagtgctattcagttccctgatagtaccgggcttcgtattaaccgatacgcgataggggttaaaccaggcgtgtactttcatcccacgcttgtgggcttcgtcgagcataaattgcagcggatcgtaacccggattttcaccaatcttaccggtcataagatcggaccacggcaaaattttcgatggccacagggcggtaccgtccggcttgacctggaaaaagaccgtgtttatgccgagacgttgcagatgatccagtttgtcgatcatcgcctgttgttgtacacgggcccggctggtggggttactaatgttaaccgaggaaaccggtggccagtcgagccgagaaaccgtggccagccagatgccacgcatcggttgtgacgattgttgcgtcgtggctggtggctttgaacctgctggtggtgtcaccatggactctggaggcgtgcttttacaactacacagtaaaagtgccagtgcaactagtatcgctggtcttctaatcgttaatttcttgtttcgggagcagatatccatatgtgctggtttccggtaaacagatgtgcgctcattctcgtacttatccccgttaagtcaatacgacagcaagcacgaaaaagggagcgatgaattatcgctcccttgtcttataaccattcagacatggttagtgtttcttgtcattcatcacaatatagtgtggtgaacgtgcacgcgggtgcaggaagaagtgaccttttggtgcgttctgactgttgattggctccagagtgacgccggtatttgctttgcctttacgatcatgaacagcatagagaataaagggcagggcaagtaccaccaggaaactaacaaccagtaattcaacatacatatcggtagaatcaccctggatgttatccggcggcaggaaggaaacaataaacgccataattgaagtcagcagaccgacaattgccacgaccagtttcacccctttaccaccagggatattaaatgtgcgttttaagtcaggatgtttaagaaccaacacaatgtagccaataaacagcatgaaataagcacacagataaatcaccaccgtcagcgccagtgcgatcaggaaggacatgttgttaccgccaccggtattggtgaggatgatcaacgcgatagacgtaatcaccagctgcgaaatgaccagcgttaccggtacgccatttttgttcattttagcgaatgccgctggcagcaggtttttctgcgctgtgacatacatcccgcgagaaggaccaacaatccaggaggcgatttccgccagaacacccagcaacagcagtgcggagatcacgcgaaccgtccactcaatttctggtgccacatgggacatcagaacggtaaaggtttgcattacccctgcggagaggttgatttcattacccggaatgaccatcgcaatagacaaaccaccaacagagcttaagcagattgccgccaccatcagcagtaacatagccaacggatagtcgcgccctgggttgctcatttcattgacgtgggttgcggatgcttctacgcccatataactcaaaatgaaggcaacaaatactaccagggtgcccactttagagaagtcagggaagaaggtcttcgaatccatttcgatagcaacgggggcaccggagtgcagataaatagccgctaatgcgatcaaaataaatgcaggtaacaggataccggcgaagaagccaactttagcaattcgcgccgtgtatttcgtgccaccaaactgcgttaatgccagcgcccaaagaatgatgagtgctgcaatagttttggtaatggggtcttcattcagcgctggccatttcaggatgtaggagagtgcccctaacacgaaatagagcatcggaataaaaccaatggcgatttgcagatagccaaatgagatcgctgcaaatccccatctcggccccagagtatttgatacccaggcgaagacaccaccttcttcccagccgtcgacggtggccatttccgcagcacaaagtcccacgggaataaaccataaaatcccgcctaatagcaggaagaagactaatgaaaagcccgatgttgcgaaggtagggtattcataaacagccattaccatcgatgccgttatggcaaagaatccaagtaatgtgagctgcttagctttacctgtctgtactgatgtagccatattatccccctaaaacggtattcctgtcggaaccgcacctgttttgttctgaagcgtattcagaacaatattttccgttgctaatgccagtgaacagactttggaaattgtcccgaaacgggttcgtttcgggacaccgttaccgttaaacgttatcaggtatgtttaaagctgttctgttgggcaataccctgcagtttcgggtgatcgctgagatatttcagggaggctttgtagtcttccagcaacagttcagcaaagtccatttcgaagccgcgacgacacataatgcgcatcaccacgatgtcggtggcttcaccgccgagagtgaaggccggaacctgccagccgcgcagacgcagacgttcagagaggtcatacagggtgtatcccggatcttcaccatctttcagtttgaagcaaaccgccgggatgccttcgtccgggcgacccgtacagatgaactcatacggccccagtttggcgatttcatccgccagataagcggcaacctggtaagaggcgttctgtactttggtatagccttcacgaccgaggcgcaggaattcatagtactgtgcaattacctgacccgccgggcgggagaagttgatggcaaaagtaccaatttgaccacccaggtagtcaacgttgaacaccagttcctgcggcagcgcttcttcgtcacgccagataacccagccgcagcccagcggagccagaccgaatttatggcctgaagcactgatcgatttcacacgcggcaggcggaagtcccagacgatatccggggcgacgaacggtgccaggaagccaccgctggcagcgtcgatgtgcatgtcgatgtcgataccggtatcggcctggaatttatccagcgcatcgtgcagcggttgtgggaactcatagttaccagtgtaggtcacgccgaaagtcggcaccacgccgatggtgttttcgtcacaggcttcaatcatgcgtttcgggtccataaacaactgaccggggcgcatagggatctcacgcagctccacatcccagtagcgggcgaatttatgccagcagatttgtaccggaccgcacaccaggtttggtttatccgttggtttgcctgcagcttccatacgcttgcgccaacgccatttcatcgccatcccgccgagcatacaggcctcggaagaaccaatggtgttggtgccaacggcctgaccatttttcggcgcaggcgcatgccacagatcggcaaccatatttacgcaacgcaggtcgatggctgcggattgcggatattcttctttgtcgatccagtttttgttaatggataaatccatcaatttgtggacattttcgtcgtcccaggtctggcagaaagtggccaggttctgacgagcgttgccatcaagatataattcgtcattgataatctggaatgcgacatcgtcgcgcatttcgtgcagcggaaaacgttttgattctgcgatagtggaaatagacttcgcaccaaaacgtgaatcgagtagttccgaccttaaatccgttacttgcttcttatccattttaaactccttaaaatgattggatcgcattaaaaaagtaggatttatcgataaagtaagcaagtgcaaaggactcgtgtttaaataacaaaatcctaatgttatttatcgtgagatattacgcgaataatattttttcattgaaaaacaatgcaatatgaaattcttgggtggtggtaaggtgttttatgctgttatttttatgcgcattctgtgtctcctgaattatcacgtaaaaatcagaccttaaaatatcactattagtacttgattattattttgaacgcatttataaaattattacataaaaatagcgaatattgctaaaatccccgccaacgatgtgttgacggggctgttattattttggcaataatactccggtataagtatttaccggatgagaaagatattgtttaacggcagtgttaacattctctaccgtcatttgtttcaacaattgctcctgctcagtccatgctgcaggatcgtcatattgaataagactatttacaatggtgttcgctaattgttgaacgctacgctgttggatatcgaggctgcgctgaacgttttgctggtattcattcagttcttgctcactgatccctttagccagacgcttaaccatcacttcattcgctaacgttaacagttcatcatgtcgttctggttgacaagtaaaagccagcaaatgactgatatctttggcctgaggatcaaccgagaggcgagaagaaacgctgtatgccccagatgcctgttcacgaatattaacgcgtagatcttttgccagtgcgacgttaaaagcatcgagcgccatacgcgtcggcagattaacaggtgtccgggaatcataacgcttccactgtgaaacctgtgccacaggttcattttgttcttttacagtaaccgatgcgttgtccgtcgcgcgagttaatggtttacctgcggctaatggcgaatcagagtgtttgattgatcctaagtaacgcgtaattaacgccacgagtttgtcttctgcgacattaccgacaatgacaaacgtgatatccgctggagatgaaaacaattggcgatcggcagccagcgcatctgcggcagtaaactgtgcaatctgattttcttgcagtaatttcgtgcggtcatcagcatagcgcgtctcatacatctgctgggcgaatttctccgctggacgctggtcgagcgttttcaacgcctgaatttgagcattttgtagcgatgcccaaatattatcgttaatcgtgctgtgggtgattcgctggttaatcaactgaaaaccaggttcagggttattagtccgcgcgctaacggagagcaacgtattcatgccactgactttactgctcatggttaccgaattttccgcactccagcgtttcaggctggaagaggagagttcgccaacgccgcttccgctaactgctttatttgccagcgcgataagtgatttttgctgcgcagggaaacttaaatcgcctttattcgatacggcaataatttgtagcttttgctcttcacccgcggattttgccagaataaccctggcaccattggaaagtgttaatgatgtcagattctccgccagcgtttctttgctgctaatttccgcctgtgggtctgcgtctactgttaacgataaatttctgcctgggaagacgtaagccgccagctttttgttggcgtactccttttccagcgccaggatagccgcaggagacaatgcttttttggcggcaacctcattgtttaccatttgctcccaaaatgcgtcctggttctttcttaactgctgccatttttccgccagactttgcacggtaatttgctgccacagacgtttcgaaagttgatatgtctcttccggcgacaagaacggcgtattatttaatgagctggatgccaggcgactggtcagcatacgtaaatcacgttcagcttgctgatcaaccgcatttttcagccaggtgaggcgggtagatttgacatcatcgagtttttcagcagaaaaaccatgctgatcaatggttgccaactctgccattaatgcattcgcagcatcctgcatattatcgtctcgtgcatttacacggaaaaacagcgactgataatcgggtgcaattttaacgctgcgcgcagtgccgccagaaatagtcttcaactcgcccgactgtatgcgttcctgcagacgttgattgaacagctgaactaacatgctccattcagcttgttcgataaagctttgctcatcgttcacttgtaccattggcaggcgataatagagtgcgatgccgttcacccggttttctttatcattaatgatattaaagcgcaggtgattttcagcttttgtcggccagacgcgattttcagctgctttgttagccggaagcttacttaaattatcctttatcagcgccagcgcttctttactgtcgatatcgccgaccacgataaaggtcatattattgggttgataccagcgttgataaaattggcgcaattgtgccggtgtgaccgtggcgacagtatccatcaggccgataggttcacggtctaaattacgggtattagccagcaggaaagggcggcgcgcctgagaggtgcgccatttcgcatcctgatgggcacgccattcctcagtaattacgccacgttcagcgtctacttcgagtttttcaaaggtggcggcattactccattcactgaagattgccatcacttgttgcagattttgtttctgcgtagtcggcaaactcacctgatacaccgtttcgtcatagctggtataggcattaacatcgcgaccaaaacgcaggcccattgactcaaatgtttcgatgactttattacccggccatgtttttgtgccgttaaacatcatatgttctacaaaatgagccacgccgcgctcattgtcttcttcctgcaatgaaccggtatgaatttgcagccataaatttacctgatcctttggatgagcatgcggataaatcatatatcgcaagccattgtccagttgcccggtaattaacttttcatcctgcggtaaggcggcggcaatcagccgcccggggagcaacagagttgccactaacgtcagtaagaaacagaggtttctcataattatctccatgcgaaaaccgggcgaatttacccggttaagtaaaatccgaactattaaaatttcatgctgacatcaagccagaaagtacggccactggcgtaggtcgccacaccggtgttcgttgtatcaacagcggttttgctatccagtacattgagaatatcggcactgatcgtcaggttttgttgtttcagaaattgtggcgtccaggacaagcgggtgtcccaggtcaggctgctatccagtttttcgtcaacatactgcttgtaatctgaatattcgctgatgtattgcgcatttgtcttaccaaggataatgcgagctttacgcgcttcttgccaggccagcgtattcgcccacactaacccgctcggttgatgcgtgaaatccatgtttaaggagatctttaatgggttattaaaatctgccactggaacgctatcgtaagagaccagattaccgttataaaccacctggttatcaccggtattgctctcctcataaccattgtttaacgacaagttgcccttgctcttgatatagctaaagacaatttgtgggttaatatctacctggcggatatgcaggggttcggccagttcaaaactgaggctgaacgaatgcgttttggttttgccatcgttgttatattcagtaatggtggttttagtcgcgctgtcggtacgactgcttttgctgatttgatcatgcgcttcacggtaaacatagtttgcacgcgcaataacgttcttaccgattttctgctgcaatcccattgccagttcatcgttataaggcgttttcaaatcctgataacgcgtcagagttttattacctgataccgattccgtccagctattgcggatatcacgtaatcccatatcaagaatattcccgccatagtaacggttataacctgctgtaatcattgaggtttgattagcaaaaatatcccattccgtcataaagcgcggggagatattgtggtttgacagatagttgtcatagtcataccgcacgccgggcattaatgacacattacgccagctaatgcgatccgccatatacagcgtgtagttgtcaattcccaggcggcctttacctttatggtaaatggtatggttagttttctttccggcagcattaatcacataggattcagactggttatggcgttcagtccacgcatcggaatagatgtattccgcgccgaagtagggttgatgcgaaacattacccacggcgaatttttgccagtccaggcgtgttttgaaggtgtaattatctacagcctgggaaatgtgtcctaatccgccacgggtgcaacgccctgtaatatcaccatatgtacatgaaagttcggtgtaccagatgtcatgatcgtgacgggtataatcactaatatgatcccaaccaacggtggtacgcagtttggcccatgcgagctgcgtatccatatcccatgccagaccataggatttattacccatttcgcgatcagactgcgggaaggtgctggtattataatcacggctggagccggtatattttaaggttaaatcgtgggtaaagcggtcgctggcaaaccaggtaaatttgcttaatgcagtatcgataacgtttttatactgtgcccgaccggcgacaatgccgtcattcgaaacataatccgcgcgggtgatatcagactggcggcgcgataaaccggcggtaacgccgaagttatcagcgagttcctgattaaacgacaaggtataaaagttctttttaaaatctggggagtaataagtacttcctgaagagccttgattaaatgcgctcttgttattctcatcgatatgcgatgttaaccagtccgaacgcgtagtgcgataacccaatttcaccttgctatcatcagcgttgaagcgtttgatctttgcatcaattaccccgccattgaagcgaccaaattcaaccggcacaaaactgtcataaagcgtcacattgtccagtaagctgacatcaagataatacccctgtgacatcccgctaatattggttgcactactggcatcggactcattcgctgggttcaggttattagttgcactaataccgtcaatcaaataggcattctggtagggcgacgcaccgtgaatagagattttctcagggcgaatatctccctggttcaacgaggtactttgcgttgaatccatgcgtaccgcagggttggttctcagcagatcgctgatattgccattcccggtcggtaaacgctcgatgctttcactggtgtaatgcgtgttgccgtttacgggtacagggacaggagcatagaccgtcatctcttcaaaaaaatgcatgtacatgtttttgtcatcgacggcctgcgccacatcagcgccacataaaatgacgccaggaataagaactcgcttcatttatttatatctccgtacagcagggcttttattgtttttataaaaccgcgctaatgtcacaaatatcatcggccaggttccagacaccgggttgatgtgtaaccataatgacgccgcttgtgggtagtttttcacgcactaaacgcagtaagcggatagcctcttgttcctcaagatgagaggtagtttcgtcaagaaatatccatttcggacgtcgtaaaattaatcgtgccagggcgatacgttgtttttcgccgctggaaagaatatctccccagcgatcgtggtcatgaatacgcgcagccaatttcccaagaccaacctgatgcagtacttcgctcaacgatttatcgtctacgggcaggggaagtgctttacaaataatctctttcagtaagccggttttgattaacggtgtttgtgacacataccaactgtcagcaggagaagaaatatcacctttaaaccacggccagcagtgggataatgttttaagcagtgtggtttttcccgcaccagagtagcctttcagtaatagccatttgcctggcgaaacatgaaagttcaggttctctaatatgatcttattatcaggcgtacgaatactcgcatcagccacttgtaccgcatgttggcaatttttaggcttattcgtagggcgctgttcagtgagttgatggaactcatacaagcgatcgataaccgcagccagttcagcaagttcatcatatttataaataaaccagcttaaattgttcgataccagcataaatgcctggcgcgatttcatcagtccgcccagattgatctgcccgctaataaactgcggcaataacagaaagtagggaagaacgctaagcgagcgcgaataaatattctgccagtaatcaagccaccgctgacgattcattaaacgatgccagttctctttaatggtatgaaaattgtcgctcaactcctggcgttgtagagactcagcattgcttagcgcaatcagttctgcctgcttattatgctgcacaagatttgttcgaaatgtcgcttcgctacgttgtttttccacattaagcggacgaatacgtttacccaccttatgggtaaataaagttccaccgatcacaatgagcacgacggtatagaccatatacccctggatattccattctgttccaccaacagtgaatgagagcgtacccgcgctttgccaaagaataacggtaaaggtgatcagcatgctaagtgactggatgaagccaaatgaaagactgagcgttttgctgatcagtaagagaatgtcttcagcgatacgttggtcagggttatctgtatttttatgctcgccgtagatctgcgtgaagtagtagtttttatctgcaaaccaccgattaaggtagtaatctgttaaccattcgcgccagcgaatagtcagcagtttaattaaccatgttttgtttacggatattaatacaaagatccccagcagggcagggaaccaaaggacaagctgccaaagcttatcggtttctttctggcttagcgcattgaaaaaatcattattccagtcgtttaaccagacctgaattttaaccacgccaaggatcattgcgaggataataatgattaacaacactgaagttttattattcttacgcagccaaaagggcttcaacagacagagatactttgctatcaacatacgaagcgtaatgggaatggttatcattagcgaaaattgattgtgccatccaatgattatctatggcaatgatttactgatgaaatttatttaagtatcatttaacaatatgaaatataaaggaatatttcattttcagtggttatggttatgctattgataatcaaggatattgctaatgccctgatgcataccacgtaagccaggattttcgcaagggaagatgatgatgacgaaacacccgacaggaatttatgtcgggtgccttgttaaggtcataagaaggaggctaagaatggagttaaaagagagcgttattaattattctccatttgttttgcaacatccataatgtggtaaagcggtactctgttcttagctaactctaccatggcgttcatataaggtaccatggttgaaaaaaggattttataaccttcgcaaaaataagaaacagtctcattgtttactttagtaatacgatgcttaggacaaccgccattgcagataggtttatatgcacattgctgacatttcgctggaatccgttttttttgcgctgtcagttgtacactgttcatcgttttgagttcagatttattaatgtttccaattttgtactgtggatagacaaaatggtcgcattcgtaaatgtctccattactttcaacaaccagattatccttgcaggactcctggaaaatacaactggtatgcccattccccaaaaaacggctgacaaagctttcaaactgacggatgaaaatttcacccacatcgtttttaacccattgcataaaaatggttgacataaacttgccataagccgtgggaggcacagaaaaatcaatgatacggaatgtgttctcactatgaccactgaaatcaatattcggcgtcccggtttctagcaattcgataaattgcatatgtttactgccgatagattttaaaaaatgataaacctcaagagggtaatggacattaacgttattaatgacggttaacgtattaaactctacttgatatgatttcagacgctcgatggctgctatcacttttgcaaaagtaccgttacctgaattactgcgtctgtaacggtcatgtaactcctgggggccatcgatcgagataccaatcagaaattcatgttctttgagaaaggcacaccattcattattcaataaaatgccattcgtttgtaatgcattaaaaatacgtttttggcctgcatagcgttgttgatagtgaataactttacggaaaaaatccaggccagccagagtgggttcaccgccttgccaggtaaaatagacctgattgccagacgctgcgatatattgtttgatgaactctttcagagtgctgtcatccatccatttttcatgagtaaactgcgactctttttcaaggtaaaaacagtaatcacatttgagattacattgaaaactggagggcttggctgtaacgtgcatcgctatctcgctcaataaggcggcggaaaaatccgccgcatgaaggtttagttatttcgcttcgcttagtgctttcttgatattgttaaacttctcctgatttacctcgctaagcggtggctggctgctgtcgataaactctcttaccacgccttgcatctctttaacgacctgcggattggcggcggcaaggttatctttttgctgtagatccgtcagtttgtagagacctaactgattgttttctactgtatagacaagcgaataatcgttatttctcaccgtataagagaattggcttaagtcctcagtgttggggttatgcgggtaatcgtctgactgatggcgaacaaatttgtggtaattatcccagaatggaatattttcctcgtcaaaccagtgagaataagaggttatccaggtcagatttttatgtggctcgccttgtttcttatcttgcaaccagggcagcaaggaaacgccatccagcttaaggtcttttggaatgctgatatcggctgcatcaagagctgtcgggtagaaatccattgcggaaatcagcttgtcataattaccgggttgaagttttcctttccaccacataaacattggggtgtgagtaccgccaggataggtctgactcttatagcctttttgcgccccgttcagcggcagaggaccatcgataaccgcaccattatcggaggtaaagagaataattgtattgtcatactgtccgtttttcttcagttgttcgagaatgcgttttacaccctgatcaacagaataaacggaagcgtagtagttatctgctgtttgactaccggtattaaattgcttctgatattgatccggtgcaggattatcatttggcaggtgcggagcattataagccaggtaaagcataaaaggctggtcaagtgttttggcacgatcaacaacgccaattgcctcatcggttaactgatcgctgatataaccttttgcggggacacgttcacgatttttgaacagtgaaggggagttgtaatatgccgttcctgcagcgtggaatcccataaagtaatcaaagccacggttttgaggttgccattcttccgcagaaaatgtggtgaagttgtcatgatagtcacgcgtttgtttatcttccggtaccggcacattactgatttttgacaagtgccatttacctactgctgcagtgtaataaccatgattctggaataattcaggcaagaaagtttctgttagcggaataccatcctgagcatcggtattggaatagacaccaaagcgggcgggagctcgaccggtcattattgcggcgcgggaggggccggaaacaccgtgtgccacatagccgttagtaaaacgtacgccttcatccattaatgaaaggagcgtcggcgttgatttttgtgcagcttcaatggctttatctatccctattttgtaggtatcgacaacttcacgattttccattgtttttgggtcaaaagatcccttatcaaaaggaagttgtccataaccaagatcatccatggtcagtacgataatatttggctttcctttggtactgtattctgtcggcgtaaagtctgagaaagcaacgtttgttttggttgctttcagctttacatcatctgccgcatgagcagcaaatgcagccataccagatgccagtatcaaagatatcgaggtacttacgacacttttctttaatgcagacttcataaatgttcctcttcttattgtacttaattccaaagtaattttacgaagagaaataagtggatgtaagtgaagttagtcacataaagagatagcagatttagctaaaaaaagggaaaaaacagtccataaagcgttgacattactttctgttctattaagtaatttctcgccgataaacaactaatttattgatatttaataaattattgcattttactgacaaaatgcagaattgagatcataaataatcatgcaacaggttatgcaagtgcataaatatgtgatggatgtcacttatttatttcaataaatatatcgcctaaaaacaacgcggggcagggaatggctgccccatttaattcttacgcagcgtgtgtggttgactactcgttagcaaataatcaaatagctaaagcattcatcgtgttgcccgtattcatacccgtgtgactttgacaacggtactccttagaaactctcttcggactgttgccgaaatgtttgcggaacgcataaataaaataagatgtactggcataaccacattgttcggcaattttattgactgaaccttctacgcgtatcaaattttttgcgtgctgcattcttgcatctaaaagaatctgtgagaatgtcgtttgctcttgcttaagttttttcttcaacaggctttcactgatgtacaggcagtcacaaatatctttcagcttccatgggtgcgccagcttcatgttgacaatatttctcactttcccagaaacggatagcacaccgttagttaatagtgtaatgaaacctttgcatgcggcaaaaatagacaggcaagaaaaaagcaaaagttctgaaaaattatgatgattgcgttcttccgagttgagataagcaatcatttcattaagcaatccagtcggtacatttgaagcacgtaaaaacttcgcaggaacaggcaccgtcactgtctggatgttagtgcattgtagatattttttaatggtattttcattaaatccgatttctttaaaatgccgctcataaggttcaaaatttgtacgaacagcgttatctaccatcaggatctcgccgtcagagaaggcgtaatctttatctaaaatgttagcgttgaaagcatgatgaataaatataacagaacaaacgagcgacattttatctccttaaaacaataaagttttatcgatacttttttaacatttcacatttataatttgctgtttattttcagtcttgcaaactattgataatgaaatgtgtaagatctcttgcaatgcgacccatttctgaaatactcagctgatcaattgccgaaaaaatggctatcaacgtaagtgtcagtaataagacaaccacaattacagacatgatttctttatagttgtctctttgcgtgattttgtttttcactgtggtcgcatgcatttcaaatatgtttatttagcggataacgttaaaaatcgttaatcagtatgcttaatataacaggctggagaaaagaggaaataggactggtgcttcagtactgagcggagtttcttacagctgtaggcagaagtttatatcttatagtatgtagtttaatttaatccatgtgagcaaattgcgcgataatagtcaatgaggaattcttctgctgtgcggatgacagcagaagaaatgagaagaggcattaatttgatggttctaattcaaccggaatacttttatagccaggaatgccacttaatggatcgtggttatcaagtgttagcatgtgattcgattctggaaaataggtcaccagtgagcggtcagccatagggtaaatgaccacttttaatctatccatgcggcgtgagctgcgcttaccgtctggcgtaagcgcaataagattaactctttcgccgttttttacacggcaaattttagcttgtttagcactcataaagaccacatctcgttgaccgaatacccctcgatagcgatcatccataccataaatcgtcgtgttgtactgatcgtggctgcgtactgtcgccatgaccagcttactgttaaacgctgaagagggatcttctaacagccctttgctggtaatgaaattagccttacctgacggcgtcatccagcgcctttcagcagctgcatttatcaggtgaaaaccaccgggatgacggatgcgctggttatagtcggcgaactctggcagcacagcttcaatgtcattgcgaatgcgatcataatcttccaccagatactcccaggctaccacgctctggggtagtgctgcctgcgcgattcccgcgaccactgcacactctgatttcagcattacaccggcgggttttaacacgccacgcgaggcatgaatcatcgacattgaatcctcaacggttaccgcctgcgcaccgcttttttgcatatcaatctcgctacgccccagaaccggcagaatatagctatgccgtgcggtcagcagatgagagcggttaagcttagtggctacgtgtaccgccaaatctaattgcgttaacggtacagcgctcgcttcccgatctggcattgccagtgcaaagttgccccccatgcagatcaatgctcgagcctgccccgtacatattgcttgcatgctggcaattgcagcatgtccaggtgcatgaggtggggtgaagccatagcgctcacccaggcgagccagaaactctgcagacggtttctcggtgataccgacggttcggtcgccctgtacattagagtgaccacgtagtgggcagatacccgcaccaggcttgccaatgttacctttcatcaacagcaaattgaccagttgctgtacgttctgggtaccatgttcgtgctgagtgatccccattccgtaacagataatggtgcgttcggcagcggcatatgcgtcagccagttcggcgatttgtgtctgacttagtccagaaatacgttcgatatctttccactcggaattgagaacgtcacggcgtagctcgtcaaagccgacggtatgcgtttgaataaattcgtcatcaagcaatgagggccgacctgcggcacttgcagcatcatcgcgctcaattaacaggcgcatcatccccttgagcaacgccatatcgccaccaatgcgcacgttgtagtaggcactggccaactgagtctcagagttcgtcagcatttcaaacgggttttgcggtgcggtaaatcgctccaggccacgttcctgtagaggattgatggcgatcattttcgctccccgtttcactaaagcgcgcaacgaagtcagcatgcgagggtggtttgtaccagggttatgcccaatgcaaatgactaaatcgcacttctcaaagtcttccagcaacacggtccctttacctacaccgatactcgctgccaaacccacgcttgtcggttcatggcacatgttggagcagtcgggaaagttattgctcccgtattcacgggcaaaaagctgataaagaaaggcagcttcattggaagtgcggcccgaagtatagaattcaacctgattgggatcactatagctttgaaggcgtgcgccaatttcgtcgaaagcttgttgccagcttaatggcttgtaacagtcgctgacggcatcatatttcaaaggctgagtgagacgtcccgcagcctcaagctcgtgatctccccaggtaagtaatgattgaaccgtattctcagcaaagaaagaggcatttacctgcttatccgtgacttcccaggcgattgcttttgcgccgttttcacaaatgtcgaatgacgcactgtgcttaggatctggccatgcacaacccggacagtcaaagccctctggcttattcatgtcaaacatggcaataacatcctggcgtatatccatctgcttacgtactgcattcgctacggatttgacagcaccccaaccacctgcagcaccctggtaggattcaatttttttcttcatctacttatcctgtgtggaaatgaattattaggatttgtaatagcgatgatgcacagtacatacaaagggattatcgccaacatggatatataagagtaggggactactctctttctatttttaatctattatcgttaaacaatagattaaatacgataagttaagcatcatctctcatagtgtttaaattaacatatttttcaatataaaaaataagactctggcttcaattgtgcgcggattttcttacaggtgtaggctaatagccttcacaaaataattatccgcgcaattttcgtgaatggagcgcatagactaaggtcaaaatcacaattattcatagataaaagtgacaccaatgactgactggacggttccggctgaaaccttgtttcctgtttgtccataggttgcgcttaaacccagaggtactttgcttttatttactgtccccagggagacattttctcccgtagccagtatttttccattacgcattagagtgacacccactcccgatgcttttgttgcatcaggtgctgtgttagcaaacacttgtcggctactgtcagtggtggcacccgaaagataaaatgagagcttttgttcgcttgagcaatatacgccaaggggtatttctgcgcttccaggaaagtccgggagatccacggtgacattacgactatcaacggtgcagccgcctgttggcataacaacattgttatttgaaataatattccacgtaaaattacgcggatttccgcttcctaatgttgcaattttatacatatgaatacgggcaatgacttcccccgcttttatgacaactccaccggccgccccaactggggtaatatagagttttaacggtaatggcatcggtgtcttatcaccaatatccaatacgttggtatttgtcgtcaacgggaaggggtaggtcacattattccagtacagcgatcctttatatgactgtagggagcctgcgaaagctgagccttgtaccaggtttatatgatcagtgtcgtaccagccgccgtaatcattccagcaacttatatgctgagacaagtctacaaccagattctggcccggctgtattacagggtcgagattaacataaacagaggttgtacctgctccaatacttgacccgccatcgacattacaactgaaggcaaaaactttgcctgccattaatagaagataaataccgaacaggacctttatactgattgttttacccatgatatatcctaaggttaaaaattgatttaaaaagaaggctaagaaaatcgaatcgacgttattgccaggtgtagatcacattgattagcgcctcgatcgttccctggcttgcgtttccattcaccgtgatagctcttgccttaagtggaaactgtgcattacgagtgatctcatcaacaataaccgttttgctatcgccattttttaacgcagcatcctggtcatccctcagctctatctgaatattttcggcagtaccttcatttttgtaataacccgtattgtcagttgaatctgtcacgattgccgtcactgcacttgtttcaaccggacaatcggttaatgacaaagtaatattgtgccagccagatgcagaaccaggttgttgcagattgcgcgtataaagatccccgagattaacgttagcttctttggtttgaatagtgcagggtttagcgactacccgaccattaacagtgatagtgacatcggcggcctggagagttgctgtgaataacgcgcaaaacgtagctaacaggaacctcttgtgaagtcttttcatatctgactctgattattgaaattcaagggtaaaggttgccgaagccctcaccagtcccggattgacggacttctgagttgacttcagacgagcggagtaaggcaaaatattgttctgttctggtaccagtgggatccactgcatcccggcatgaagatcattcagtttcaccggacgcatatttgcgtccaatatttctatacccaaaccggaggccgtattgcttccttcatccagtttcaacaaagtattattttctgcatcctcaataccgttaaatgcaacccgaacccccgttgtccctttgctgcattcacttaacgtaatctgaaaagggacggctggacttgtgctaccggtcgttggaaattgtctggcactgtttttttggagatctacggtaaaattaagcgaatccgatgagactgtgcagccataatcgaggacgcgcccgctaattttaataacgctatctgcggataaagcagaataggtggttaaccccagacataaaccgaggaaaataatgttattgtatttcataatctattgttccttagcgacagattgctgtctgctggttcagtaaggtaccaggagaaacttcaggaagcttgtactcgacaatacagtttgagtttttatctttgccccatgaaacctgtaatttccctgactgtggaagtccagtcagataaacctgaccgttttccgcgacaatgctgccatttttattctctccgtgtgtgacaattgcaccgaatggaacgcttttattaccgtacttcaacgtcattaatactttcccgccgatttgtgcattaaatgttgctctggcaatagcaccgtgagttgggatgacagtgactacggtttcatccagttcaacattatctgcaagggaattcgcgttaagagcgacacgattttctctatattctgtcgcaaatggtaatattgcatagccacgccagtcggtatgaattccggtctggttctctattttgacattatcagcgccaggagccttaaccagaaccattgtgtcgcccagcggctgtccaaaggtgatgccatcagcatgagcaataatcccaccactcattccgtaataaatctggctgctgtcaccactccgactgtaaccgacattcgtattaccgtaagctccacgataattaagagaactgtaaccactggtgccagacgatgtattacccccttgggtgttaccgacctgaacgctataattcaggttattatccggcagcagagtgccataaacccccgatagattggtcatgccgcctttcaaatcgtttgacatactgtaactggcatttgaattacgaaatgccgactgactgtctgtacgcatccaatgactaaagggaacattaagcgtaaaagcgagtaaatgatcccgatcgttttgccatatattattggaatagctgtaattcagcgaagtcgtaatatcaccaaacggcacatttaatccaaatgatatttgctggtcgctgcgtgacgtgttccagtaactttggcgactggcactgaaaaatgtcgtaccgtaatttccaagctgctgagagatgcttatttgttcctgaccacgcttactgtagaacagattaaaataatcaataaattgtgtctgctcattgctgtctccggtaggaggcttgacggtgtaaccactcattcgactgtatgcactgtcggataagttataaaaaccttgcgtagaatagcgatatcctgcgacctggatattggttccacaacaagtttattgctgcacttgttgaagagagtatttgcaaaaacattttatgtcgctaaataacatgacgatttcattatgcatgttatttataaaccgtgactaaacagaatattattgcgaacaagggaagtgtcaggaaaggtcaagagctaccaatggttaatatggctataaatcattagctatggttaatgtttgcttgctgaaactaacaccgaattgctctaaacagataagtgcagggtttattaaagctgtccgacagactttcttaacctggtaatatctctcttgggtgactctccaaacatccgcgaatattcccgactgaaatgggatagctttcgtaaccgacagcataggctgctgtggtgacatcgtaatgttcattcagcatcggtcgcctgacttcattgagacgtagccatttctgataccggagtggactcattcccgcttgatccgtccttaaataagtaacagcaccctctggtgttttcgtatgcagtgtctatgcgacagacactgcgctcttagcatggggcagggaataaccaggctatttctccatgcacaggccaattatgaaagaggagaggcttaagttcttgaaccctgaacgaataacgactaccagaaaagcacttcgcatcactcagacatgatttaactattctgggtttgaggaatatacataatttacttcagcaccagaaaaagtataacaaactgttttaaatggatattaatcaaatggcgattcaaactcacagttatgaactcagttttggttcataactgtgttaaacgctgtccataaatcactcgatgttacgcttgttggttcatgaactgttcgttctaattttgtgatgtgcgtcaggttttagtgttcagtaatattaccttttactcgatgagcgattgtttagcacctctccgacaaccggagcagcggtaaatgcgtttggccagccagcgtaaaacgcggcttgggtacgcggaggtctaaactttaccgattatattcaaatgaatctgtccttaccggcgtgccatgcaaaataggcttgtaccagcgtaacgacaagtatgcagagcaacacagagttccagttaagtgagtggccgcgaataatgcccgcaaggtaggggccgagagcaccaatcaaatagccgatacattgcgctttgccggatagctgacctgcctggctgtgttcacgagtccgcagcccaaagagcgtgaggcaggtgaccatagacattcccgcacctacacctgcgaacagcagccacacagcagaaaaagccggtttgaaaagaatccctgccactccgatttaatgaacagtgaacaaatgaggccaaggaggcgttgatccttatgtttagtaaaaatccagttcatgagatgatgactcatatcaaattgttttaattgtttttttagaaagaaatgaattaatctccaaaaacattcatgaacaaacagggaatgcgcgtcttatgagcatttcctagcagcttactcggcttcaccattttacaccttaatcgcgtaaccaagcacatgagtatttagggggcatctgattgtttacttgagtaatttatgattttctgtaacatttagatgcaccacaaaagctaatcagaactaattcatctgagggcggtagcgttgtcaaggttggttcgccttgtctgaggcgttttagtccagcaagatagttctatctatttgaatgagatctaagtagatcgagttgtgtgaagcgagcgccaattcaatttatctataaagaacttagacattgtgatgaaacttttcatctcaagataggggttaatataataggctaacaattaattaccttgttaaatgagattttcagtcttctgcctggtcaataaaacataaaggtataaataatggatgcagtagagttaatattctgtaaatcaattaattactttgattatacttcagtcaacccaaagaaaaccaattacatattaatatcgccaagtgacgataattttaatgactttgggaaaatcacctcggttttaatacgtgcacaatttgaagatgataaggttgagttccgtacaaaactagcaattctcgacgtaaaagaaagcaatcaagaacttactctagtagagtattttaataaaacaaataataatgataccccaatatatccaaatgatgatatactttatttttcgcaatgccagtccctagagacttacagatatttgcatcgatgtgttggaaaagaaaagtcagacatcattctgactaaaattaatgatctgagcactatacggaataagaaaaagcatctaaataaatttaggctatttattaaaagcaaaatatttcaaacgtccttaataaggacctcggagagttattacgctttcaaaaactcaaattttataagtggtgaaatagaatcacaagaaataaaaaataatgaattagaattctcgattgatattgatgatggagagtcaaataggataaatcttggctttaatttttcttataaaaaaaaccaccctcgaaacataataactattattggcagtaatggtaacgggaaaagtaggacgttaagtaatattgcaaaaatggctctgagtggctctagatcttatggggatagaatagaagtaaaccggattttattattcgcacctagacatgagttgcgctcattcccatccgaacattggaaaaatccggcaacgtactatagaacatttccaacaacaagatcatatcaaacgcgaagtaaaaaaaccacaactgaaaccattttagacattgtccgaagcgaagaaactattgctggcaggtcacgatgggaaattttctctcaatctttgaatgggctaactaatcacggtgaaatttatctaaaaggaagttcacccaagaaatattattctcttaaattcttaaacgatcaaaaagacaataatagcctcctgggttggggtactattcaagaagatcttgaaccaattcgacttattcaaggtaatgagtttaaattaagtagtggtgagattagctttctaaaaataatcaccaatatgacgatgcacatcgagaatgggagtctcttactgatagatgagcccgaaactcatttacatcctaacttcatagcgctaataatgctgctttacataaaatattgacagccacagggtcatattcaataatatcaacacactctgtttatattgtacgagaggtccctcaagaccaagtgattattttagagagggatgaaaaaaacaatgttgtccaaaaaacaacaggaatgactacattaggtgcaaacttaggttcattatcatcatttatatttggagaaaatagtcgctctaagcttgttaatgaaatagccaaaaaggtaattagagaacacagatcttttgaagaaattgagggcttatatagagattctttttcaattgaaatgctttcacttataagaggcatgatgaaatgaagtatttcaatcaacctcttgaaaatgacatagataaaatcacagaaattgcgaatgcaaattattccggttcaaagttgattgaaaataatctgaacattttcatcgagagatataaagaatattattcatgcaaaggtgctgcgttaagtattaatggtatgtttggactaaatgacgcaagagaaagcataaaaaagttatacaagagcaaaggaaaacaattatctttcataaaagaattgcgagataaaaatacaggaaaatgttgttcaatgtgtggggccaatttaagtacccaaatagatcattttcttccccaagaattttttccggaatattctatattaagtgctaatttaattccgatttgcaaatgtaatcaaaaaaaaggaaaatttaccataggggataatattgacgaaatattattacaccctaggtatgaaaaaaaactttccaagcggattatcacggctaaaataagaaaccatgatggtgcaattgaaatatatcttgaattcaatcctccaaagaaaatatcgaatgctaaaggcttggcttttcattatgaaaagattgttgactctgatttattgattactactatcagagagcggttttatgaaatgaagcgcgcaccaagttcggtagtatatactcttgcagatcggatcaatagtccgcaagaactgaggaatattctattttcccacctacggtcatttgataagcgacatcaaagtcaaaataattgggagtccatatttattcatgcattacttgagaaaagaacttttaattggatatggagaaaaatatcagcgcccgaccgaaagtatgatgaatctttttaaaaatctctttcgcgtcaatagtggtaatatttttttatcattgtcctctttctactgacatactgattgtccgacagtggagccagtcgaaattgttgacagctagtcggggctcgtctggtctttctagcagtaagaaacgtattaatattggatcgccactagtttaacagatacctcagaattatttatagactgacaccaccccggcagacgatcctgccctataggaagctaagtggaaacttatccagtaacagcttgtcgattttatcccagagggtgttcctcaggatgtatcgctgaaatcaaatccagcactaagaatgaggggtgagaaaccatttccttggtgggtctttgaccatttctgttgaactaatgtttttgggttatcaaggatacaaattcaaggcagtgtttcactaaaccttacctcgcttcaataccaatacatttttaatgggtataatatgtgactgcttttgccgcattattgacaggaacaaggactggtgatgaatattgatttcagtttaattcgtagcgcccccaaaagccgtaacgatagctttgaagcactcgccgtacagttatttaggaaaacctgtcgagtaccgacaaattcaacatttattagtctgcgtggagatggtggagacggtggcgttgaggcatatttccgctcaccggacggtgccgtattcggtgttcaggcaaaatactttttccagcttgcttccgcagagcttacacagattgatagttcccttaaagctgcgctaagcaaccatcccacactaaccgaatactggatttatataccgtttgacctgaccgggcgtgttgctgcgggaaagcgaggaaaaagccaggcggaacgctttgaagaatggaaaagtaaagtcgaatcggaagcgtcagcgaaagggaagtcactttctattgtcctttgtaccgctgctgttatctgcaatcaattacttgagatagacccttacggagggatgcgcaggtattggtttgatgacacgttgctgacaacagctcaaattcaacaatgtctggaggacgccattgcttttgccgggccaagatatacttcaatgctggatgtggtgacgaatgctcatgtcggcctggatttctttggtgggactggtgacttttgcgagtggtacgaaacatcattaacaccaatcgttcgagagttccattcactgaatggatacggacgcaaatcgctggatatactcggcgaaacccgtgctacatctgccacggcattgattgaagaaataattgcctactgtgagagcatgagagataacaatgtcacggccacatcggttacagatctttccgtcgctctgtcatccctattgacacttttcgctgatgcccgccatgctcaagaagataaattttatgaaaagcatggcaagcatagtgatacagaatcgttccgacagttccacgcagagtatatgtgtgcatttcctgccggagatatggatgcggcgagaaaatgggaagagcaggcgcagcaactgcaaaatttgctgacttctcaggtcattggtgccgcaacagcacattccttactgctggttgggccagcgggtatcggcaaaacccacgcgattgtcagcgcagcattgcgtcgactggaacatggtggtttttcactggtcgtctttggagacgactttggcaaagcagagccttgggaagtgctacgcagtaaaatagggctgggtgccgccatcgatcgttcgacattatttgaatgcatacaggcctgcgccgaacatactggcttaccttttgtcatttatatcgatgcattgaacgaaagcccgcgagaagtgcgctggaaggacaagcttcccgaattgctcgctcaatgcaagtcttatccagacatcaaaatctgcgtttcaacccgagatacctatcgcaatcttgtggtcgattcacgctttccagggtttgctttcgaacacatcggtttttcaggacatcaattcgaagcggtacaagctttcgcagcctactatgagctggatgcagagattacaccacttttttcacccgaactcggtaatcctttatttttacacttggcctgtaaaacgctaaagggcgaaggccgtgacagtctggatatttctttgccgggttttacctctctgtttcaaggacatctcaaacattgcgatgttttaattcgagaacgcctccactacgcaaaccctcgtaatctggtaagggctgcaatgatggcactcgcgaaaaccctgacacatgagttgccgcagaaccgaacgtgggaaacctgttgcgaagcactgagcaaaatagtgggaactgagaccacacctgaatcctttttaaatgcattggcacatgaaggcctcattatcctttctgttgtagatgaggataccttcctgatccgtctgggttatcaacgctacggtgacatactccgtgctatcagccttgtggaaactcttgattcggatacagtaaaactagcggagaaaattgcagcgttaacagaagaagatgctggattgctggaagctcttgccgccgtgctgccagagaaaactgctcttgaaattactgctgaagaagtaggattaccatccgaacaagcccataagctgttcatccagtcattggtttggcgctcccgacaaagtgtagtggaagaaattgatgaacacatccatgcagcactgcatacacctggattatgggagtcggtttatgaagcgctgttttcacttagtctggttcctgaccatcgtctaaacgcaactaactggctggggccatttttacggcagtcatccttagctgaacgtgacacctacttgtcattagctgcgctgggatcatttgataataagactgctgtctattcactcatccatgcagcactatttgctgacataacccattggcctgctgaaagccggaggctggccagtctaacacttgcctggctcacttcgtgtgctgaccgccgaatcagggatttatcctcaaaagggctaagcagaatcctggcaaactacccggagaactgccaaacagtaatcagtgaatttgcatattgtgatgatgattacgtattagagcgtattagccttgctatctacagtgcatgcttattgtcataccaacgcagaaatgcgtttatgccagcgctccctggtctattaagcattgcgtcagatagcaagaatattctgctccgggatacggttcagctattagtaaacttgttgaaaacaggagaatttcccacagccgtaacaagccaattacagcattaccagacaaacgtatcattaccatcacgatggcctgtactggcggatgtcaaacccctcctagatctggaacatttaccatcaaacatggtgctctggggagaatccatggccccggatttctggcgttatcaggtggaatcgaagatttccggctttgacttggagagcgccaatatcagccatgaaaacattgcctgttggttaatgcgagaagcacttaatttaggatatcccggttataaccactgcgcgctcaattatgatcgccatatcgggagtcagtatggctcgggacggggtagaaaagggtatgctgaccgactcggtaaaaaatattactggatcgccttacatcgactactgggcattctggccagtaatgttcccgcactggaagacccatattccgactacgaacctacaagtgatcttctatggtcagtcgacgtccgtaaagttgacctgaccgatgtacgcgatatcaccgcagaaggtgtctatccagtactgatggaggaaacaaattatgcattccctgaccacaattcagatatcaaaggttgggttaggaccgatgattttccaccttatgaagcttgtcttattcgaactgacgaggaaggagagcagtgggtagcgctttcacatagctattgggatgacgataaagcgccgaatgaaaatagctgggattccccgtacttgggagtgcgtgcttcctactcaagcgcactcataaatgaaagcatccagaactttaaacagaaaagatcacgcgatattttccaatataatcagggaagtagttgttatcgcggttatcttgctgaatatcctgacagcccggtatacaaacaacttcttaatagtgatgaagatagtgaagcgtttaattttacagaagtcagtttactgcgcggaaacgaatgggaatacgactactcatataccatgcccgagcgccaggataacctcattgcgccatgcctgggaattattcaaaaactcgaacttttatgggattgtcaaagcggttgggttgatcattctggcaaacttatcgccttccatcaaaaaggtgtaaaacaacgcggacttttcatccatcgttcggcattgaacgcctatctgtccataacaggtgaagagcttatacatcgccgttttgctaacagaggatattttgatttagctggtcgtaatagcacgcaaatagacctgaaaacttggatccagtaccgggcagacaaggcaccggtagttttacgagaagaggaactgccgtttaactgctgacaacgatacttattaagtaatcaactggctgccttggcatcgaatgccagaagagccatttcgcactaccaatttaagtagactgaaggaatacttggtacaagcaaacgcacgccatatcggatagaggggactatgaacgaaaccatcgaaaaactgattgccagtggcaaggaagggccatggtgggactttaaacaaacctaccaccaaaacaatgcagcccttgttcacgatatcctctgcatggcaaacgtcctgcatgacggtgaccggtatctgatttttggcgtgaatgatgaagggttgattactggcgtgccggaagatggtaagcaacttaaccaggcaaatttaatcgatctgttaagaaaagtcagttttgcagagcaccattgtccggatattcagctgcaccacatcacactccagcataaggtgctggctattctacaaattcgtaacgtcagaataaaaccctactatctgacccaggactatataaaagagggaaaaactgtcagagccggtgtcgtttacacccggcaacaagatgccaatacgcccgtaactagctgtgccagccctggagatgtcatggcaatgtggagagagcgctttaatctggacctggcacccgctgaccgcatagtcagactgcttctggattacgacaattgggaatatgacggtatcagcgaggcctattatcggttggacccggattatgccattcatattggcgacacagaaaaagatataggaggacaacactggtggtcaacgattagcattgagcaaccttgtcactatgaatacatcctcaaataccgtgggcgtgtacttgaacgagtgccaatcgtacattacagaaaagagggtttacagtttccctttccagagatggatacgctggcttatccgggaaaaagggatggattcgtaactgattattatgcagacgttttttacttcgtaaaaaacaccttaccctacaatctgttgagtcatatcagagaattacactcactgcctggccgtaattcaggcataaccatgccgttaaccacccagaccaaaccgccgattatcgagctgccatttatggtgtttgagaacgcaggggaaaaagaagaaaagctaaagtttattcaaagtcagcttgctgatttttgtccggatggtatgcctgatacagcctcgatgaaaactgacccagaactaagaatggaagcagagagacaattttcctggtgggtttttaaccatatgcgttgagccgaagccagtaaccctacctgggagttgttcatttttgacgttgcaactaaaggtcagcgctacgatagcgtgttttagtgcgcactcgcgtattttcctcactcttgggtgaatttggcctgctttcgcaggccatatactgcttccacgtacgacgatgtgctttaagagagtcaacggcaatacccataaaaagcgctcggttgcacgatgtggacagcatcctgatatggctcccatggacttaccccccggccgcgtctaacatagcgaaaccagcactcaggctccatgacattttttatactttactcccgacccgcagggacaaggttcatttctgcctaccgccccgaaaaatcgcgttacttcggatttagccgccttgtaagcaagctgcgcgatgtagttcgactgattttcaacctcctgtcgctgctcacctgttaacccttcaaaaaagggggctagccgacacatctccgcttctgcctgctcatgttcgcctgcaagtgccagtataacggcgtactggcttcggacctgaaccagtcgctgtaccagaccggcttcattgacgactggcaggacgtattgctccatcacctctctggcaccgacatagtcctttattgcgacaaactcatcagctagatcctgtcctacccggaccagagattcgggggctgcgatcatgttgtaaaatttcatcgcatgaatgcgcagaaacggtgacacctttccctgcgcgtcattaattctggcgagcaactctagggcatcggccagatgtttgatgtgctcgtgaacattttcagtctggttgatgattgcccacagcacatccgagtttttacccatgacatcctgtggggtaataccaaataacgcgtagtagcgattcactacgctcagacacagtgtttctgcttgtttgtatcttttcagtctccatagcgcgatagcatggttatagtcaaaaatacgcgcatgctcctcatccggaaggctgaggcgggcatcttcagccagcgtttgcacttcactaaagtctcccttttcggataagaaaagcatccgtttcatggtgtaggctgtgcgttcccggtaaccaaactcatgttctttaagcaaagctcccatcgcttccagccattgtgcaatttgctcagaaacaccgtctttaagctcggaaaaaactagcccatcgagtgcccagaacgtttgtaaaggcggcagagagtccgaagctgtcgcctgtttcaggctttccataatgtcgacagtaatgcccatctcataaaacagctcttcaccagatagagcgatgagcgtcatgacatcgttaagcttgatgtatatctgcgttagaagagaaaatcgcgaagtgtcgcgttcttgctgaaggctctcaatcaaaagatcttttaacgccagtaacgcgttatttacgatatccacgtccatcatggtcaggtgttgcagccccagcgccctgacagcatcgtgtacctttaacgtctggtttccatagttttcaatggttccggtggcccgcatttttttaattaatgtggctgccccgtttgaagggatatttaatgagcgggcaaggtaccctgaaacttcatcacggcttagccccacatcggacagactgaacaacgccagagcgttctgaaccagtggctcaaacccctgatagacacggctgagaatgacttcctgcgcggtttccgtgctgttttcctgttgccgcagttcagcacacagcgtgtctatatcccctttgtattcctctgcggcaactctcgccgcgctttcgacatacagcggcaaccctccggtgtagcttcgtagctgctcatatcccagcgcactggcgtgcccaccgaggtcggccactgcggcagccactgtgtcgatatcccatccctgtaacgattcacgctgaagtccagtcatcgcctccagttgacggacattgtcatggggctggcacagcagcacaaaatggatacgggttgtggcgtgcagaacatcccgcaggttctccacagggatacgatgcgcgttatccagaaccagcagcaggttgtcgttccgttgctgcaagaaggtgtcgaacgttctcagcgcttcaacgccactggcaccagggagcagtattcttcgcaggccaccttgctcctgagtcgcaaaccgggctgccagctcacgaaccagcgtactggcaagtgcagggcctggaaggtcgccagcatcgtaatacgcacacacctgggtactgtgctgggcggcctgtgctgcccatgctgatttacctgcaccggacaagccgcaaatgatgcgtatccgctcatccgacacaaaagagggttcctctctttgtggccggtagagtgtcggcggtgcagggaagtcctgtaactgaacgatgagctgttcgaacagggcaggaagatcccgggtataaaacgcatgctgtccgtcggcatcacctccggtggcagcgagctggaccagaccggccagcttccagatcagggattctggcgacaatagcgaaaacttcagctgctctgcttgcgagatgcaccacgcggccgcatcagccacggtgtcccaggcagggggaagtgcgggatggcgctcagcggttgactggggccagataaaacggacatccgcaggaagcgtcttatcctcaatcatcttctgcaggtgtggacctggtgcctggttggcgacgataacgaaagaagcgcttccctggcggcgcccaacaatgtgctcgttacgcatctccgcaaacctcgcgagcgcgccagacacatcgctgggaatgatgggtttctggcgggttttaacctgaacgtaaatgcgctcctgtacggagttgagctcaatatcctcatccagctcaacggttactgtctccacgctgactttctgtgccagcagcaagcagccaacggcatacaagtgctgataaaggaatcccctgtgtacggctttaatacgtaccaactgggcagagtccagaacatccggcgtagatttttcttcgctccccttcatttttggtccttatgttacttgtcagaaatatcccagatttgcatatcagcctgcgtaatagaacttaagcatggctaccaacagtttgaccagtacacccggattaatcggtgcgcaacaatttcacctcatattctggtggagacagatgtagtgcgtatggtgttacatcaataattaaagaaaattcacccgctgtcagatatgtcagtaaaacaggttatatatcattgattgggcaattcaggggcgttacttttatccgtatcagtgcactatctacacgtttgtggctatctttacgaaaagcgtgtggataaaaataacaaaagagggagagtgccgtggtcagagtttgtaaagttgaaatccagaacttccgctctattcgtttactgacctggcagccttcgccagggcttaactgcctcatcggtcctggggacagtggcaagaccaccattcttgacgctatcgatttgtgcctgggagcacggcgtaacgtcagtttcagcgataccgatttttttggtctcgatgtgactcagcctatcagtattaccctgacactgggttcgttgccggatcctcttagggcaatggatgcctacggtaattatttgcaggcgttcaacagcgtgacggggctggttcaggaagagccccagttcggactggaaacggttctctgtctgcgtctgcgtgtagacagtgagcttgagcccaactggacgctggtatctctgcgtggcgaggccctgggtcaggaacgcaatcttgcctggaaagatcggctgctcatcgcaccggcgagacttggcacctatgcaagctcaaatttgtcctgggcacgcggatcggtgctcaatcggctcacggaggagcgccctaatctgggggctgagctgtcaaacgctgcgcgccaggcccgaaccagtttcggtggtcaggctgcggtacaactcgcggcaacgctggacgtggttactcagaaggccaatgagctgggtgtgccggtcggtggtcggactcaagccttactggacgctcacgcggtttccatcggcgatggtgcaattgcgctgcacaactcagccggtgtgccgctgcgttctcttggtacggggtcgtcccgtcttctggtggcaggaatgcagcgtgctgccgcgcagcgggcctccgtggctctggtcgatgaagtggaatacggactggagccgcatcggcttacccggttactgaactctctgggggccagggaaacaccgccgccacttcaggtttttctgaccacacactctcccgtggccgtgcgtgagcttaatggcaaccagctcttcgttgtgcggggccatccgacagctccccacctggtgctgccggtgggcattgccgatgatattcaaagtacggtccgggccgaccccgaagcctttctggcgcgtagcgtgatcgtctgtgaaggggctagcgaggtggggctgatccgcgggctggatcattactggaccgccctcaacggtaattccatgctgagtgcaggaaccgcattcgtgaatgttggtggaggagagcctgaccgatgttttgtgcgtgggctggcactgcgtcggcttggctaccgtgtgctagttctggtggatgcggataagccgcccaccccggcgacggtcgaggccttccaggccgcgggtggagaacatatcacctggcgagccggtcgcgcgctggaggatgagctgtttatgagcctgccggatgcaggcgtcgacgcgctgcttcagcgaggcattgagcttatggaggaggaactggtggcggcacatatccagacgcagtccaacggtcaggtaacgcttgctcagatccggcagcagcgccggttgaatggccccccttattccctagaaatacgacaattattggggatcgcttctcgtcatcgacgaaatgggtggtttaaatcggtgacccggtatgaggatgtggcgcacgatatccttggccctcatcttcccgcctccgatgccgggttccaggcgctgattaaccggctttacgggtgggcccatgccgcctgactacaacctgctggaatatcatcggggggcgattacggccccggccgggtgcggtaaaacacaaatcatcgcggataccctgaccctgtatacgggggccaggccggtacttattctcacgcacaccaacgcgggtgtgacaacactgcgtctgcgtatgcaacgcgccggtgttactgctgcgacctaccgtatcgccaccattgatggatttgccatgcgtctggttgcgatgtttccggcgcgcagtgggctcagcgttgaggttcttcaactgcgcaatcgcggggctgactatcccgctatacggctggctgcctgccagctgctgcagggagggcatctcgatgatgttctggcggccagttacgctcacctcatcgtggatgaataccaggactgcaacctggtgcaacatgcactggtaaccgcgttatcaacggtgctgcccgcctgtgtactgggtgaccccatgcaggccatttttggctttaggggtaaccagctcgtggactgggatacacatgtactcgctcactttccactgattggtgagctcaatcatccatggcgctggactaacgcagggtcgccggagctcggtcgctggcttctggactgccggcggatgttgctgaatggtaacgccattgaccttcgccaggtgcctgccggggtgacctgggtaccgttacaggcagaaaccgctgttcagcagcgtcttactgccgccctgacgcgcgcggtcaccgcgaacgggcaggtactggtgattggaaacagctacgacacacgcgggcgtcagcagatggccagccagatcccgggggcaacgaccgtcgaagccgtagatttggtcgaccttaccgactttggtgcagcgtttaacctggaagctgctgatgcgttgacgcgcctggtgcagtttgccgcagacgtcatgacccaggttggccccgcagcattgctgccccgcctggaaacgctacgaagagggcgagcccgcaacccgccgacggttgccgaagcggcgttagtggcatttgcggagagaccaggttttatgctggccgcagaggcgctgcgccttttgacccgtcaggacaatgcgcgggtctatcggccagaggttttgcgctgttgtttgcgcgccctgcagtcggctgctgctggaggctgcacttttgcagacgccacggtaaacgagcgcgaacgcaatcgccacgagagtcgacccctggcccggcgtgtaatcgccagcacattgttgctaaaggggctggaaggggaggtggcagtcatcacatccccggaagagatggatgcacgacacctctatgtcgctatgacgcggggatcttcgcggctggttgtgtgctcgctaactcccatattggcggcccgctaactccgatgcaaagcgcccttgctcgcaaatcgcaccttccttaggggcagtgcatgacgtacagccctatcaaatagcctggcttctatcaccattcttcacgccttgccggtgaatcaaactccttttcaaccaaatttgaagcctttgtataagttgaaataggtccagaactaagcgaaatctccactcctaaagtatttaacacgttgtatagacgctgaaaacttgcttttgaagggtttgcctcaagtcgagcataagtctgctgagtgacacccaacctggcggataattctctttgagttaatccttttgatttacgaaaaccaattaaaagtggccgtaactggctaagaagtctgaccgggaaaacattatccataagtaggtgaccatgtcgattatttaaaataagtccactttgcgtaaaaataacagccttcagggtgtttttttactttacagcttttaaggtgtaaggatgaactcgttgtttaatttgttgcattaaagtgttaaaggttgcatctgggactgactaagattatatttttcaggactagcatatagtggtacgcgctgctaacactcatattagtgaggcttatcagtgcatgaagggagagggcagggtaggctttgccctctctttttcatgactgcattaaacttcaaattctttttaaaactcattgccttattgcgatatttttattaacaatcccaatcagtgtgtttattttttcatttatcttaatatgtcttctatcttgctcaagagaaagttttctgaattcattttccctgctcggcacggcaattatcaattcttcataaatttcttttgctcctgacactttttccaattcactgctgtatttttcaatgagagatcttatttgaatgtttacatcactgtgttcatggctggtagcacttgaaaattgaagggaggtttttgggcttacctcaattaattgcacattttcttttgctatattgaattctgatgtgattgagtataaatattgatacacgcctgattttcttactttatttaataatccttttttaactagatattgaatttggttataagaaaaagcttttgcctttcgataagttttcgggagtgagaatcgctcgacaagaatttttgctacatcattactggtgaagttatccttgcaaatgtggattattgcagaaaatatgtacgactcagggttggatactcgactattcatatgactaaaacaatgcagttaacttaggattgctaagtatacaacaatggcagatacttagacaatctaagcattcgaggccaatgaagatgaatcagtgtctgaaaaaaatccgataccagaacgacttaaggaagcgagatgcagggcgggtttatcacagcgctcactgggcctccttgttgggtttgatcccgcttcggctagcagtcgtatgaatcattatgagaaagggcggcatgtccccgatattgatacgcttcgacggatggcgtcagagttaaacgtgccgttaaactactttttttgtgatgatcagaccacagcagaacttgcattactcatatcccggatgacagaagaagagcgaagtaatcttatcgaagcactcaaaacgtcttcaggtgtaaaacatggtggtaacaactgatgttctacaaaaggctattgatcttttagaaggtaacgaaagtgcagcattaaactggtgtaaagagccaaatcgccattagaatggaagactcccttcgacataaaggacatagaagagggagtattgataattagtgcgctaattttacgaatagagtaggccgtttactcattagctcattcttgaatttcttttgcgctcagcaagttctcgaatgagatcgtctgcaagcatgtcctctactttgataggagttgcgttgtcgatatactcaatgatgtcggcgagcgccagtacatttcgttcatatttagctttcaatgctataatttcagcatcaagacgatttgccttacttatataagcagcgccggttcgccccatagccaatttagccttttcatctgtagtcaactctcgtttaccatcttcgtagttgttatgctggcgaagcctgtaattattgatgataatttttcgagaggtgagggtactaatgccacctttaactattcctttggctttaagacgggcatgtaacgtggatggttgaattggggatttttccagtccctcttgcaccatggcttgtagctcggctttgatgtaagcatcaagttccttaccctgaatgactttatcgtctgcattgcgactgcgaggggtcttagccattattatttctctctatacgtttctgttcaataaagaaaagatcagctagggtttttggggttttgccaattagcatttgtttattaattcgctcaataactttatataatgggttgttcagatcatcagaaaacagggaaaccaattttttctcgccttgaacgtttatagcatcagcttcaagagcctcgagcacgatgagagctgatcttacccagcaatagtggacacgcggctaagtgagtaaactctcagtcagaggtgactcacatgacaaaaacagtatcaaccagtaaaaaaccccgtaaacagcattcgcctgaatttcgcagtgaagccctgaagcttgctgaacgcatcggtgttactgccgcagcccgtgaactcagcctgtatgaatcacagctctacaactggcgcagtaaacagcaaaatcagcagacgtcttctgaacgtgaactggagatgtctaccgagattgcacgtctcaaacgccagctggcagaacgggatgaagagctggctatcctccaaaaggccgcgacatacttcgcgaagcgcctgaaatgaagtatgtctttattgaaaaacatcaggctgagttcagcatcaaagcaatgtgccgcgtgctccgggtggcccgcagcggctggtatacgtggtgtcagcggcggacaaggataagcacgcgtcagcagttccgccaacactgcgacagcgttgtcctcgcggcttttacccggtcaaaacagcgttacggtgccccacgcctgacggatgaactgcgtgctcagggttacccctttaacgtaaaaaccgtggcggcaagcctgcgccgtcagggactgagggcaaaggcctcccggaagttcagcccggtcagctaccgcgcacacggcctgcctgtgtcagaaaatctgttggagcaggatttttacgccagtggcccgaaccagaagtgggcaggagacatcacgtacttacgtacagatgaaggctggctgtatctggcagtggtcattgacctgtggtcacgtgccgttattggctggtcaatgtcgccacgcatgacggcgcaactggcctgcgatgccctgcagatggcgctgtggcggcgtaagaggccccggaacgttatcgttcacacggaccgtggaggccagtactgttcagcagattatcaggcgcaactgaagcggcataatctgcgtggaagtatgagcgcaaaaggttgctgctacgataatgcctgcgtggaaagcttctttcattcgctgaaagtggaatgtatccatggagaacactttatcagccgggaaataatgcgggcaacggtgtttcagttcattcattccataaattgtggcgaacatgaccggtagggtagtcacatcatcaactatgagatgagttctctggttgttcctcgataaatgtaagatggaatatgccatgaacttagcggatgccccgtaatttttgcgttatgaagtcatcgtaagtccacaactaaactttggcaactgactgattcatcggtaagttcctgaaagagaggaactcatgaacctaagaacaaacccaccatatttaacataatatacattatgcgcaccaatataaaccaaggaagaatccagtcgttggcggtcatgattgtcatgttcattaacaatgaccaaaccccatatctcacttactaccgtattctcggcttaaccgtccatgcaacctcaacacattgctttcaactgccgtcaccacgttctccggaaaatctgtcggtaatgaagtcttcacgttatccagtgctgctggaatcattctggcaaagtcactcaggatttcatgcatctgcacttccgggaatctcagcacctttgctgtcgccaaaaaatgtcgcggataaattttatcgattgccgtttttttgcctttggatgcgttaagccccattgccagtttgagatcgctgatgtgtattcccgtaccgccaaggaccggaaatgctgaaatgatgtcgtaaaatggcgtgagtcgataactgccgccagcctgaataaatacggagaagttttttgcatgaccgtccgttgcgccaatcaaccactggaagacctggaatttcataaaatcatagcgatctttcagcgcctcgctggaccccatcaaaaaagccatgatccgcgcgatgcctgggcctccatctgattcatatttcaccgatgaaggtaaaccgaatgtctgacacatatcctcctgtggcaagcgaagtaaaaccgttcgctcagcattccaacgcctgtcaaaacgttcgaccgctaacgcgcgcacatttcccgctttaatgatttctgcgtccggaacattcaacccaagttctttcgccagcagcagacagtaatactcattatcaacgctttggctgagatcgagcgtcgcattgggctgcctgatttcgccaatcggtaatttaatgatgtgcgtcgtcggcgttattcctttcggaatgcaccagtcattgcctattctgagcagtgctgtcttctcctgtgcgccagcaaccgagatgcgaaagtcattttcttctctaatcatgcctagcgggatatctgctttataagccgttaatacttcttcaagtctggcttcagtaagcttttcccatgccattatcggatgcgttacggtttcgtcttcgggtattaacgtcacggcaccaacgctgtctcgccctatttctgacaataaatcaaacggttgtctggatttggcatgataacgtttaacgatccggtcacgtacaatcgggctatcgggtaacaggttatcgaagaagttaaatacggcatcagaggtgatattccccctctgcaatggcagcgaaagtgacaacggtctggcataacggcttgctaaccactccggtgcatacttaaaggtgtgcgcgccgttggctaacttcgttaactcgcctacccgctggttgttcatccaagtgacaagtttaggcattaccactccagattttgctgttctgttgattctggcgaggcatttttcgcgtcgcatagcgtcattgagagttcaagcgactgtaaaatcttaaaaaatgtcgtgagcgtggtattgtcagggttgttttcgaaattggaaatcgtcgcctgcttaataccaatttttttcgccagctcgctctgcgtccagccattttgctggcgaaccagtttcattgcattcgccaattgcgttgggctatagatcttctgaaagctcatcatgtcatacgtccacagcaagtttatccgcttaaggggatattataagttttatcctttagtgaggataagtcaatctggaaacacatcttatccgctctacgggataaacgctgcgatatccgcgatcgcggataaaaaggaggatttaaataaggcgttgatgcgccgtttgaagtcggcaatattaagccgcatgccatctcgacatgcggcttatacggtttaccagctatatttcactcccagcatgccctgagtatcgctatagcctttatcacctagttgcacaccgacattcccccacaggctaaggttgttatttactttcgcctcaaccccggtacgtacttcaccgagattacgcgcaccttcacggcctacggtttgaccattcatcttcacggcgtagactttgctattgttgatccagttcgcttcaatgtaaggctggaactcacgctgtttaccatcgtcacgctggtgatggctgttcaggtaggttttcaccccaagtcgcgtttgcacatttccgtcgccttccgtttcaatgcgcgttccgtctttccgggtatggtcggaatctttcacacccatccaggtgatttgcgcctgtggctggacgtaccaggtattcagcgtcccttcgctgccgctaaatgttcccgcttcaaaggtatacccaccctcaacagaggccgtcacaccgcgagaatcatagtcgtcagcagaacggttatcggaactgacgctgttatcaaaccagttatacagcgcccagctgtcaacataagcgccggtcttattcgcatcgttctgataccaggtcgcgtacagcccagcgctgtaaccgctgatgcgcccatccgatttataacccacacgattactctgagtattactgtgctgattggcgtagcctgccatcacgccaagatgccagcgatcctgcgcgttgctactccactgcgccaaatcgccgcctagctgcaatacatagcggttagcctgagtatttagctgaccgtcaccggcccttgaacgttcgtgccctccgacatgacgcatccacatactgcttgccgccccctgagaatgcagtgaatctgtatactgcggctcacccagacggtcgtgtaaacgatggctaaacagcgagttggctgcggcaatgttgctgatatagcttccggcctccgggcgataaactgatgggctttccggatccacaacagggggattattgatgggatcgggtgtatccgctggcgttacgccgtcccatttactggtcagataccagtttttctcgtcattccccttccctttagccagcgtgtagacgtaagccccagcttcgacagttccggtggtcagcgcgaagttacctgcagaattaccgccaacctcaatgagttcaataccgttgaccgtttgtgcaccgacgccgccaatgttatcaacccgaacgcgagtgttcccttgggtatcgcctttcacgttcatcttatcggtgggcgaattatcgccgcccagcgtcgcgttgaacgtcatcaggccattgtttccggtatagttgccgttaacggtcagtacattccccggtttccccccttcgctattcatttgaaccgtgccgccattctccaggttgccgccgatagtggttttagcgacacgcagtgcccccccaggcataacgttcatatcacctgcagtggtgacatttcccgacatcacaccgctgttatggatattaatgtgttgacttgccatattaatggcagagtcggaaccgaaagcaatttcccccccacgatatccgtcgtaccctgatacgccgcggaatcgttgttaagagtcaggatcccggtacccagttttgtcacatcaccgctaccgctgatactgtgcgtcatcgcccagctacgctcagtggagatggtgagcaggccattattgataacggaagcatcacccaggtttttctgctcgttgacgctgagcgcgctgcctgtatcaatgttgaattgccccacaaagcggctattatcgccatccaactctacatctgtcctggcggttgcgctcacgatacccttcccgcttatgctattacgcagttcgccagtcacgttttttagcgttaacagaccgtcattggcaatatttcctctgcctaacccctgagtattatcgaggctgacttccgcatttgggctaatgctggttaacgcattgtagcgtgcattaagcccctcgatagccagcgttccccctgtaacattcaggtttccgccacctgtcagttcaccctgactgatcccacctttatttaccgtcagcgccccctctttgaacaaaacagtcgaacccatctgcccggtgaatgtctctaccgtctgcgtcgatccattaagatcgacgatggccgcgttgctgatgttcagttcccgggtgttgccaagtgcaccatccgcatcggtacgtaatgtccccatctgaacgtaggttgccccctgatagtcgttctgaccgttggaaagcgaaacctgtcgcaccgtattgattgccagatccccttcaccaccgatttttgccgacatatcggccgttgcgccataggctccgccatgttcggctaacgtcagcttttgcccaccatggatgttcagcgctttcagcccatagttaacgtacaaaccattacctggtgcggtcgtgaggcggaatccataatcaccctcggcgaccaccgttccgttttgcgcaatgtgtaacgttttgtccgcttccacctcgtcgccctgtaaatcacgtaacgttaatgagccacccgacccaataaccgtttgcgccttcaccagttgaacgccgacatggctatcgtcgtgttccagcaaattgagcgtcgtcagagggttattcgccatgggatcattccacggtttaggcacgtcgataagcacgtcgcccgtcccgtttacctgatagttacggcctttccaggtgtagtcactcgcgccgacaaccagcgtatcgacgctgatatatccctccgcgagcgtcgcagcaggaatatccgtatcgaaaatgagcgtaccgccattcatggccagtccaccaatggattgctctcccacgtttaccgatgtggtattttcactgtcagactgcaacatcgcgtgagtaagcgcagcggtgttgtcgcgttccagagtgaaggtactgtctttcagttgggcaacaccggcgaattcagtccctgttgcatgggtaaagccaaacatcttgtcggaggatgacagctgcactcgcatcaagtcatcgcctttgagcgcattggtcagcgtgtaatctcctgcactgttcgttgatgcgagaatgtcgagcgtaccggggtttgcaatggttacttcactcgaccccatgcccgttaccccatctgccgtatgagacgcaatggtcaggaggccgtcattgaccagcgttttaccgctataagtattccctgcattgaacaccgtatggcctgcatcatggatcacttttccgtctttatcgtcacctgtaatcagcatatcgacctggtagccggcatcactgttattggtatgattaaagacaaaaacgccttcgccaagaccaaactccactttcgtcgcattggtgataaatccggcatctgccgccgcctcaccgtgagcagcaccaatgtttagcgttcctacagcaggctcaaaaacacctaagtaaacttctccaccttcgacattcagcgtaccgttattcgtcagggttaacgtacccgtaccagatgtccctacgtacatattgaatgtttcaagaagagagttctgcccatccaccctcacgtcgcccttacttttgtcattgagagctatctgtgtatcacgcgctttaactatacctccggtggtaatattcagttcacccgtgcctaatacaccgacctgtagcaattgtgcgttagtagatgatgtctttaaattccagagactgtccgttgaaatattaactatccccttaccggaggcatttcctccgataaatccatagcccgttgaattaagggtggcaccattactgacatttacgataccgctaccaaaattaccgacattgatacccacagtatcgaacgatgatgtcgcatccatcaggttcagtgtgccgataccgcttgctttatcgcccaaaaaagtaatattttgcgatacgaacttaccgccatcgctaatattgaggtttccgacgcccgcaacaccaatggtggtatagacattcttattgacctcccacattccccccgtggtgatgctgacattcccgacgccggtttctccataaccgagtgaacttcctccgttgctgacaacaagcccctgattactgatattcatttcgccgtggccgtcataaccaagattagttccgagattagtgataacggagttcttatccttaacagtaatgttgcctgtgcctgtttctttcatccccgcagtgataattcccgaatctactttgccttcactcgagacattaagttcaccgtcgccagcatcaccgatatagatatagcggaaagcttcgcccgttccgaggaaattccaatgccctttatcggtcacgttgacgacaccgtgggaaccgtcctgaacgcccaccaatgaatattctttgttattaatcagtccattattggaaatattgactgtgccattaccgaaatattcattatagagtctgcgtaccgtgatgacagagtcttgatcctgcacattcagggttccgataccggtggcattgccaccgataatcgtattttcagccgtaaccagccccccctcgcgaatagtcgcctccccagttccttgattaccaatttgaaattcaattgaggaatcattattttttattagccactcgccacccttttcaacgacaacctggccattactgcccgcctgatagcctaaaatggcgacgattgaactcgtgacgtaacccttatccgtaatatttaatgaacctgtgccatagctacctatttcgaataattcggtcgtcagaacagagtcctctccctcaacattgaccgtcccgacgcctcctgtcgaagaacctaatcttaaatagcctccatcgacgtgacccttctgtttaatattcagcgtccccgttccggattgacccacatttaaaggccttgcattatttccgctatcatacaatcgccaggtgccacccaaaacattaacggtgccctctgagtcctcattagcgccaatgacgctggtagtaatagtggttaaggaggcattaccgccagccaaaatattaagcactccagtgccataccagccaaccaggtaggcatcataagcaacatcagtatcaatattggtaatctgatcattatcaacttccagacttgcaccagacgctgaaccgcttagtgccagcaaaacacccagcgtcaatctactgaatttcgttgtcagtccagaggatttacgcaaattaaccgtcgatgttttacctgccctgcgagttaattccgagcaggcctgaaatacctgtagagtgcaattccatatcacgcgatagattctattcatataaacgctccatatacaaacaatacagccacgaaagagatgagtcgtcagacattaaaaatgaaacttattaaattgtcagaggtctgtattgagtgttagttggaggtgggaaggtgtcaatttggctaatttgctaatgctttcgaattgatagattaaaaattgcatagttcttattttatttaaaaatgaactatgagttattgttgcttaataagaaaactgtttctttcaataagaaaattatcatcatcatatttaacaaagaatagcactaattgctaaaaatcgaagtttattaaaccccttttgcatccattagtgtctttaggaatattcgttataaaataagggttatgcttaatgctttaagaaaaatagcaatttccccttgaatatattactggtgatggaaggatgaatctgcaagctggcatttaacaagccagttctaaaagaagggaaataagaataactatactcaaaaactaacagccacggtcatcatgatgtggctgtcaatgaaactataacccaggcgctttccataacgacgtcgtcagtccatgatcaaccagccccagctgatcctgataaactgcctgccacttatcgcgtgaatcctgataaagttcatgcttttccgggtctggtgtgtgcgtccgttcccagcgaaccaggcgttctccggtttctgccattgatgaaaaaattccggcaccgacgccagctgcaatggcacatcctaatgcagtggcttctttgaccaccggaatattgacgggtaatcccgagacatcagcgagaatttgactccataatttcccttttgaacctccgcctgcaaagactaacgatgaaggatgaatattcgagaaatcagcaatttgctgcaagttacacgctgatacaatcgccgcattttcttccagcgcacggaacaatgtcgctttgttacatttatccgggtcaatggacaagttaataaaggaaggcgcagcgtgataccaggttttaaagcgcattctgtcggagaatatcggcattacgccccacgacccaggcggcacccggctggccatctcttccagcagcgtataggtgtcgatgcctaaacgttcggcaatcagtttttcttcggcacagaaagcatcgcggaaccagcgcatggtgagtccggtaaaaaagcttatagattcagcttgtaccatgccaggaataacatgaggattaacgcgcacgttcatttctgggtctgtcaccggcgcggctaaatttacaacttgctgccagaatgtgccgccaagaaccgcggtttgtgccggacgcacaacgcctaacccaaggctaccaagctgcacgtcgcctcctccaacgaccaccggagtgcctgccttcagaccgcagagttccgccgcttgtgaacttaccacgcccagcaatgtgccggtttctttgacaggagaaagaatatcggcacgcaggccagccatatccagcaatgcaggtttccagtcacgggtggttagatcaagaagtcccgtggtgccagcgttagagggatccaccgccagttcgccgctgagcatataggccagccagtcgctgatcatggtgatggttgatgcctgacggtaaatatcggaacgatggtgcgccagccaaagtaatctggggatggcacttaaagccagtgtttgtccggtcgcgcgataaacttcgttttcaaaggtattgttgtgcagttctttaagttcgctaacttcgcgcgccgctctggcatccacattggcgcaggcccagatcggtgttccttcattgttatataaaacaatgccttcacgcatagaacatgccgaaacggcagcgatatactccgggtctatgccggcgttgtgcagcgcctggcgcatacactcacacgccagttgccagtttttgttgagatcaaattccatagaaccaggaacgtccggtactgccagatgccgccactccgcctgtcccactgctatttgattgccttccaggtcgaatatcacagcccgaatacttccggtgcctgcatccagcgccatcaggtagtactttgattctgaaggggtaaagagtcgagccattagattatcctcggcttatgcgttctgtctgttcctctatacgttctccatcattcccggtaataaggtcatgcaaatttaacaacgtaaaatcgccgctgctgtgtcctgatcggtaaccagtgcgttgatataaccgcctttcattgcagcggcaattgcttcggctttattttctccccctgccacgccaacccggacgggtatggtcttcagcgcgcttaaaggtaagccaatcagttcgttatgtattttgatatccgtgacaacgtcaccttttgcatcaaaaaagtagcctaaaatgtcgccaaccgccccttttcggccaatcattaactgttcgccctggctgatataaccggagcgaatgatcgtcgcgtcgtcttgttgactcacggccccaatgccgacaatcgccacatccgctgcttgcgcggctagcagaacatctttgacgcaattttcattttttagcgtacgggcaatgtcagcggaggatgcccgcaacggagccggaataatattcacactgcacgccgcgttaagctgcccgatacccgtcatataagaaccgacgccaccggagagcgtgaccaggcgaatttgctgtgacgaaataaaaccacttaagcgttgcagcgtattcatggttgcctcgccaaaaccaatcgccagcatctgttgtggttgaagtaaactcatcaacatatgcgccgcgcctatccctagtcgcccgccgacatcagcatccgcaagcccagggatcacccggacatgttgcagcgaaaactgacgacgtaattgtgtttcatattccagacagccttcaaagcgagaattaatctgcacgcgaatgatgccggactgatgccctttctccagtaatcgcgacactttcaaacgggtcaggccgagacgatcgctgatctcactctgggtcagcccgtcgtggtagtaaaaccacgcgatccgcgcgacctgttcttcttcacacattccctgttctgaaattactgaatcgttgattgtcataattcattcttcactttgaacatatttaaatctttaatgcaattgttcagttcttgcgcatttatatctgtgatggcaaccacagtttgactctacgagcatgaacaaacgcaaccgtgaaaatcaaaatagcataaattgcgatctattcgtcggaaatatgtgcaacgtccacctaaggttatgaacaaattaaaagcagaaatacatttgttcaaaactcacctgcaaaactgaacgggggaaatatgcaaacgagtgatacctgcgcgttaccgctactttgcgcccgctcggtttataaacagtattcaggggtcaatgtcctgaaaggcatcgattttacgttgcatcagggggaggtccacgccctgctcggcggcaatggtgccggtaaatcgacgttaatgaagattattgccggtattacccctgctgatagcggtacgctggagattggaggcaacaactacgtcagattaacgccagttcatgctcatcagctgggtatttatctcgttccccaggaaccgctgcttttcccaagcctgtcgataaaagaaaacatcctgtttgggctggcaaaaaaacagctctccatgcagaaaatgaagaacttgctggcggcgctgggctgccagtttgatctgcatagtctggcaggatcgctggatgtcgccgatcgccaaatggtggaaatcctccgcgggctgatgcgcgactcgcggattctgatcctcgatgaacctaccgcctcgcttacccctgcggaaaccgaacgcttgtttcgtcgcttgcaagagctgctttctactggcgtgggtattgtttttatctcgcataagctgccggaaattcgccagattgccgatcgaattagcgtgatgcgcgacggaaccatcgccttaagcggcaaaaccagcgaactgtctaccgacgacattattcaggccatcactccagtggtacgggaaaaatcgctctctgccagccaaaaattatggctggagttacctggtaaccgcccacaacatgtcgccggaacgccggtgctgacactggaaaatctgaccggcgaaggtttcaggaatgtcagcatgacgctcaatgccggagaaattctgggcctggctgggctggtgggggccggacgcacagaactggccgagacgctctatggtctgcgtactttgcgtggcggacgcattatgctgaatggtaaagagatcaataaattatccactggagaacgtttactgcgcggtctggtttatctgccggaagatcgccagtcatccggactgaatctcgatgcttcgctggcctggaacgtctgcgcccttactcataaccttcgtggattctgggcgaaaaccgcgaaagataatgccaccctggaacgttatcgtcgggcgctgaatattaaatttaaccaaccggaacaagctgcacggacattatccggtggcaaccagcaaaaaatcctcattgccaaatgcctggaagcttcgccgcaagtattgattgtcgatgagccgacgcgcggcgtggatgtctcggcccgtaatgatatctaccagctgttgcgcagcatcgccgcacaaaatgtggctgtgctgcttatctcctccgacctggaagagatcgaactgatggcagatcgtgtgtatgtgatgcatcagggcgaaattacccactctgcactgaccgggcgcgatattaatgtcgagactattatgcgcgttgccttcggcgatagtcagcgtcaggaggcgtcatgctgaagtttattcagaacaaccgtgaaatcacggcactgctggcggtggtgctgctgtttgtattacccggttttctcgaccgccagtatttaagtgtgcaaacgctgaccatggtttatagcagcgcgcaaatcctgatcctgctggcaatgggcgcgacgctggtaatgcttacgcgcaatattgatgtttcagtgggttcgattaccggaatgtgcgcggtgctgttggggatgttactgaacgcaggatattcactacctgttgcttgtgtcgcgactttactgcttggtttgttcgcgggatttttcaacggtgtcctggtcgcgtggctaaagatccctgccattgttgccacccttggcacgttagggttgtacagaggcatcatgttgctgtggactggcggtaaatggattgaagggttacccgctgaactgaaacagctctccgccccgctgctgcttggcgtttcagcaattggttggttgacgataattctggtggcatttatggcctggctgctggcgaagacggcgtttggacgcagtttttatgccacgggcgataatttacagggcgctcgtcaactgggcgttcgtacggaagccattcgcattgtggcattttcgttgaacggctgcatggcggcactggcgggaattgtgtttgcttcgcagattggttttatccccaaccagaccggtaccgggctggagatgaaagcaattgcagcctgcgtgctgggcggcattagtttgctcggcggttccggtgcgatcatcggtgcggtactcggcgcatggttcctgacgcagatcgatagcgtactggtgctgttgcgcattccggcatggtagaacgattttatcgcgggcatggttctgctggcggtgctggtgtttgatggacgcctgcgttgtgcgctggaacgtaatatacggcggcaaaaatatgcccgctttatgacgccaccgccatccgttaaacccgcttcgtcaggtaaaaaacgggaggccgcataatgcgtattcgctacggttgggaactggctcttgccgcactgctcgttattgagattgtcgcatttggtgcaattaacccgcggatgttagatctcaatatgttgctgttcagcaccagtgactttatctgcattggcattgtcgccctaccgctgacgatggtgattgtcagtggcgggatcgatatttcgtttggttcgaccatcggcctctgcgccattgcattgggcgtactgtttcaaagtggtgtgccgatgccgctggcgatactcctgaccttactgctcggcgcatcgtgcgggctgatcaacgccggattaattatctataccaaagttaacccgctggtgattacgcttggcacgctgtatctgtttgccggaagtgccctgctgctttccgggatggccggagcgacggggtacgaaggtattggtggattcccgatggcgtttacagatttcgctaacctcgatgtgctgggactccccgttccgctgattatctttctgatatgtctcctcgttttctggctctggctgcataaaacccatgccggacgtaatgtgtttttgattgggcaaagcccgcgcgtggcgctttatagcgcgattcctgttaaccgtaccttatgtgcgctctatgccatgacggggctggcgtctgcggtcgccgctgtgctgctggtgtcgtattttggttcagcacgttccgatctcggtgcgtcatttctgatgcccgccatcaccgccgtggtgcttggcggggccaatatttatggtggttccggttccattatcggcaccgccattgcggttttattagtgggatatttgcaacaaggtttgcaaatggcaggagtgccaaatcaggtgtccagcgccctttccggtgcgctacttatcgtcgttgtcgtaggtcgttccgttagcctgcatcgccagcaaattaaagagtggctggcgcgtcgggccaataacccattgccataaaggatatcttcatgacacttcatcgctttaagaaaatcgccttacttagcgctcttggcattgccgcaatctctatgaatgtgcaggccgcagagcgtattgcatttattcccaaactggttggcgtgggattttttaccagcggtggcaacggcgcacaacaagcgggtaaagagctgggcgttgatgtgacctacgacgggccgacagaacccagtgtttctggtcaggtacagttgattaataacttcgtcaatcagggttataacgccattatcgtttctgcggtttcgcctgatggcttgtgtccggcactgaaacgcgccatgcaacgtggtgtgagagtgctgacctgggactctgatactaaaccggagtgccgctcttactacattaatcagggaacgcccgcccagttgggaggtatgttggtggatatggcggcgcgtcaggtgaataaagacaaagccaaagtcgcgtttttctactcaagccccaccgttacggaccaaaaccagtgggtgaaagaagcgaaagcgaaaatcgccaaagagcatcctggctgggaaattgtcactacgcagtttggctataacgatgccactaaatcattacaaaccgcagaaggaatattaaaagcgtatagcgatctcgacgccattatcgcccccgatgccaatgccctgcccgctgccgcacaagccgcagaaaacttgaaaaatgacaaagttgcgattgtcggattcagtacgccaaatgtgatgcgtccatatgtggaacgcggcacggtgaaagaatttggcctgtgggatgtggttcagcaaggcaaaatttcagtgtatgtcgcggatgcattattgaaaaaaggatcaatgaaaacgggcgacaagctggatatccagggcgtaggtcaggttgaagtctcgccaaatagcgttcagggctatgactacgaagcggatggtaatggcatcgtactgttaccggagcgcgtgatattcaacaaagagaatatcggcaaatacgatttctgatgtgcattacttaaccggagtaagttatggcagatttagacgatattaaagatggtaaagattttcgtaccgatcaaccgcaacaaaatatcccttttaccctgaaaggttgcggtgcgctggattggggaatgcagtcacgcttatcgcggatatttaatccgaaaacgggtaataccgtgatgctggcctttgatcatggttattttcaggggccgactaccggacttgaacgcattgatataaatatcgccccgctgtttgaacatgccgatgtattaatgtgtacgcgcggcattttgcgcagcgtagttcccccagcgaccaataagccggtggtactgagggcgtcaggtgcgaactctattctggcggaattaagtaatgaagccgtggcgttatcgatggatgatgccgtgcgcctgaacagttgcgcggtggcggcgcaggtttatatcggcagcgaatatgaacatcagtcgatcaaaaatattattcagctggttgatgccggaatgaaagtgggaatgccgaccatggccgtgactggcgtgggcaaagatatggtgcgcgatcagcgttatttctcgctcgcgactcgaatcgccgctgaaatgggggcgcaaattatcaaaacctattatgtcgaaaaaggttttgaacggattgttgccggatgtccggtacccattgttattgctggcggtaaaaaattaccggagcgcgaggcgctggaaatgtgctggcaggctatcgatcagggcgcttctggtgtggatatggggcgtaatattttccagtctgaccatccggtggcgatgatgaaagccgtacaggcggtggttcaccataacgaaacggctgatcgagcatatgaactctatctgagtgaaaaacagtaactgcggatctaaggagaagaattatgcacgtcacactggttgaaattaacgttcatgaagacaaggttgacgagtttatcgaagtttttcgccagaaccacctgggctctgtacaggaagaaggcaatttgcgcttcgatgtcttacaggacccggaagtgaattcgcgcttttatatctacgaagcctataaagatgaagacgcagtggcgttccataaaaccacgccccactacaaaacctgtgtcgcgaaactggaatctttaatgaccgggccgcgtaaaaaacgtctgttcaatggtttgatgccgtgaggcgaatttatcaattttatctacaattggggtaacgcgctgacgggagtaaaaaaatgtctgactggaacccctctttatatttgcacttttccgctgaacgatcgcgtccggcggtggagctgcttgccagagtgccgctggaaaatgtcgaatatgttgccgatcttggctgtggcccaggtaacagcaccgcccttctacaacaacgttggcctgcggccaggataacaggcatcgactcgtctccggcgatgattgctgaagcgcgcagtgctttgccagactgccagttcgtggaagcagacatccgcaactggcaaccggtacaggcactcgatctgatttttgctaatgcctcactgcaatggctgcccgaccactacgaattgtttcctcatctggtttctttacttaatccgcagggcgtgctggcagtacagatgccagataactggctggagccgacccatgtgctcatgcgcgaagttgcctgggaacaaaactacccggatcgcgggcgtgagccgttggctggcgttcatgcttactacgatattttgagcgaagccggatgtgaggtcgatatctggcgaaccacctactatcaccagatgccgtcacaccaggcgattatcgattgggtgactgccactggattacgtccgtggttacaggatctgaccgagagcgaacagcagctttttcttaagcgctaccatcagatgctggaagagcagtatccactgcaagagaacggacagatactgctggcatttccgcgtctgtttattgttgcccggcgtatggagtaaatatcacgtcagctggtaatgacgatcgggaagaatttttgctggaatttcggcttcatcgttcatctgtaacaggtcaatttcaatagcgttgcagatggcatccagtggtaaatcattgttttcagtaccgaacggatcttccagttcttccgccagacaatccagcgaaataaaagtgtaggaaatcagcacagagataaaaggcgtcatgtaatgcaggtccacgaccagcgcgaacggcagcatgatacaaaacagataaacggtacgatgcaaaatcagggtgtaggcaaagggaattggcgtataggcaatgcgctcgcatcctgccaggaccgctgaaatatcattaagccgatcgttgaggctaataaacaggatatctgaaagctgtccattgcggcgctgaaccgccaaccattctcccattattaacaagatacggttagctggagagttcgaagccagtacacgctgaagatcttcagtcttgagataatgagccagcacttccgcctgtggctgtttgcgtaatgtcatgcgtaaacagtgggcgaaagcgatttgcagccgggcaaactcccttacacttgccgaatccggcaatgtcgtttttacctcgcgcagtaacgaccgtgaggcaatcatcaactgcccccaaagttttcgcgcttcaacgtaacgggcgtacccggcattattacgaaaaccaagaaaaatggcgatggcgacaccgagaatgctgaacggtgcgagggtgaatttgatgcccagatgcgtgtaccagggcagcatgaaaataacagcgatagaaaagagaaaattgagtagtaagcgcgaggatatcttggataatactgagccgtgccagacaaaaatacggcgcagccagtgttgttgtggacgaacaatcatggttatcttcaggcgtggaaaagtcgccctattaaacgtgattacgatcacattctcaagacgctacttacaaattacctacaagcttacaacattagcaggcgctgcatgtggcacctgttaatgataaaggcatataggatgttgtaactaatatggtgaaataagaaacccggtcgaaaccgggttcagaagtaacggtgttattagcacaacggacgtacagcttcgcgcatccctttttcgagaatcgcatccaggtcattagcaacctgctcgaccagaccaggcacttgcgtcaggtcctgctcccagtggtctttttctgccaaaacaatcgctaccagttcctgggtgccgataacacggtcacgatgctggctccagagttgctgataacgttccagccagtgtgcatcgtcctgtaccggatatgtttcgccgttacgctcaccacgatagaacgcaatcaatgccgctaatgcgaaagtaaggcgcgccggaagtgtgccgtttgccttctgccctgccagcagctgtggcaggatgcgggtgcggaacttggtcataccgttgagcgcgatagacagcagctgatgcttaatgtacgggttacggaaacgcccggtgactgcactggcgaaagattccagttcatcacgaggcaaatccagtaccggaataatttcttcgtagatagctttttcaacgaatgcgcaaatttcagcatcgttcatcgcttcacctacggtatccagccctgcctggaacgccaccggcaccagcgcggtgtgcgcaccgttgaggattgccactttgcgttctttgtacggtttaatatcgtcaacaatcagcacgttgagcggatatttgtccagacgcagttcagtcgctaaggatttcggtccctgaatcacaaacaggtaaaagtgttcagcggtgtcgagaaaaccatcgtgataacccagttcttcttccagtttagccacttcatcgcgcggataaccggtaacgatacggtccaccagcgtagaacagaagctgttagcctgatccagccattgaataaatgcttctggcagtgcccactcttgcgcatagcgcagcaccagttcacgcaacgcgtcgccattgtagtcaatcaactcacacggaatgatgatccaacctttatccagcgcaccgttgaaatggctaaagcgttcgaacagcagacgggtcagttttgccggatagcttaccgctggcgcgtcatcgaatttatcgcccgcatggtagctgatacccgcttcggtggtgttagagaaaacaaagcgcatttccgggttgtgcgccagtttcaggaattcatcgtattcactgtagacgctgatttcacgattaaccgagcgaatcagacgcgcgtcgctgaccgcttcccccttctcattcaggccacggataatggtggtgtacagaccatcctgcgtgctcagtgacggcgggaatgaagtttcaatcggacgaacaacgaccacgccagaattcagatcggtgtgctcattcaggagatcgatttgccagtcaacaaaggcgcgcaggaagttaccttcaccaaactgaatgatacgttctggatactgtgcaccgggaaaatcgcgacgatttagtgttttcacaatgggttcccttctgattagtcatacaacctgtttgaattggtacgacaggttagcaaactttaatacgccgaacccctgttttgatcaactcctgatgattaatgagcagttttatgagaaaagtgtggcgcggatcatggtttaatcgaggaaaaacgccttttcctggatcataaagtggtagaacacattgcattcaaatcgcgcgtaatgaataaagatgtcagacaacttcctcaccgtaacgcatagtgctggtacggttgcgcccatctttcttcgagcgatacagacacgtatcggcttcgaccatcaatttattaaagtcatcggtcagcgttcggtacgatgcgcgaccactaccgacgccaatacttaccgtgagataaagcgttttttgttgccaggtgaatggttgcagttcaacgcctttacggattttttccgccattagcagaccatcgacaggattcaccgacggcactgcaacagcaaattcttcgccgcccattcgcgccaccagccccttatcaccgacaatcttctgaatatgccgggcaaacacgcttaacactttatcgccacattcatgtccatagttatcgttaaggcttttgaaatagtcgatatcaagcagcatgacagtcagatgttgtgtctgtttcagcgatggacttttcagcgcctcataaagaccggaccgtgagtaaacctgagtcagaaaatcaaagtcggctcgcagcgcaacttgcttcattagcgaattgatcgctgccacgctaaaagaaaccataattgggcatatcgccatcgtggcaataccgagacgtgcggagaacatttccggaatggagaacggcgaaccgaccgagatatcaatcaccgaatttgccaccagtacgatttccaccgcaccggtgacaaaggtcaacagacatgttacctgcggcgtatagcgcactgcacaccagattaatgcaggcagcgggaacgccagactccccgctccaccaatgactaccgaggcaataaccgacacaataagcgcgatggcgggcatcatctgttctgctttaaagcgcggcagcactccaggaatagccaacgtcagcatacaaggcacgatcaacacgcccgttgagaattgctcactgaaccagtcggcaagcaaaggccagaaatccagactatcaatactgaccgaaccaatcgccccgacaatagcgcataataatgcggcaatcagacagtaattaaatagccgtaaggcacttactggctcatacttatttttccccagacgcttatcccgcacgaccagtaaggcgacggtaacaataaacatcatattggagaaattgatagccagtgaaaccagtccccattcggtggttatggcatcataaaccagcatcgccacataactgatcgcatagtaatgcagtcgattaagccagacatagcgggcaaacacccccgccattacgccattcagcggccagaaaagagaaagttcgtgaaccagccgtaactctgcaccaataaaatagaacagcgtggttagcgcaaaaatagcgatgctattacgtagcagatgaccttcctggaacaaacggaaagttgaaatggggtgtacatgcattaattatctgtccatacaattgcgggtggcaattatctcaacgtaataagtaaattctcataaaggatagcatgttcgctaacagcggcggcaaataaaggtaccctgggaatgctattttatcgttttccgcaattctcatggctgattcatctgtacaaccagccagtgatagattaccgccacgatataacgttgttgttcttcgcttaacgaaacaccctgcggaatgttatgccacttagccagacaaccgcgacagcaggtcgcggtggcgtgctgagcgataaacaccggatgcccgcgcatgggggtttgcttaccgtcattagccggtaatgccggagcaagacgtttagcgacaaaatccgccgcatgttgttcgatgactggcgcgcctttctccaggcaatactgacgctctttcatgcccagacgaaagcgagagcgaaattttgaacgggataaacgcgcgaagagtggatcgagagactgcattaataaaccgaacgccctaactgtttcgtcaattgttcaaggacggcaatacccgcaagcgagttacctgcatcatccagttccggactccagacagcgatggccatttcatgcggaacaatcgccacaataccgccaccaacgccagatttcgccggtagccccacccgccaggcaaactcccccgcgttctggtacataccactggtcgccatcagcgcgttaatttgccgcgcctgcattggcgtcaccactggttcatcaatatgaatagctttcccctgattagccagaaagacaaacgtccgggccagctctacacagctcattttcagagcgcagtaatgaaagtagttttgcagaacggttgtcacgtcatgatggaaattgccaaacgacttcatcagccaggcgatagccgcatttcgcgcggaatgttcaaattcggaacgcgctaccaccgtatcgtaggaaatatcagacacaccgcttaagccgcgcacgacttccagcatacgttgccgtggtgcgcttaatcgcccttgcaacatatcgcagaccaccagcgcaccggcattaatgaacggattacgcggtataccctgctccatttccagttgcactaaggaattgaacggtgatccagacggatctttgccgacgcgttgccagatttcctcttcggagtaatgacgcatggcgacaacgagactcagcactttggaaatagactgaatggaaaaacgttcttgcgcgtctccggcctgaaaaagctgtccgtcaacggtacagatagcaatccccaatcgggaaccgtctactgtagccagcgccggaatataatccgcgactttaccctgaccaatgagcggccgcacttgccgcaagatgttttctaaaattgcattatccatggcgactgccactttctactcctggaccgcaggtctgaaaagacctgcgagtatatcagagctgaatatgtcgcgtcagatccggtctttccacaccgtctggatattacagaattcgtgtaagccgaaatgggaaagctcacgaccaaagccactctttttcacgccaccaaaggccactcgcgcgtcgctggcacaataaccattgataaacaccccaccgcattccagacgtgccgccatctgtctggcctgtgtttcgtcggtggtaaaaatggtcgctgaaaggccgaactcactatcattagccagttccagcgcatgttctgcatctttcgcaacggtgattgccgcaacggggccaaacatttcttcccgaaacgcggtcatttctggggtaacattcgccagaaccgttggcggatagtagttacctgccccagccatcttttccccgcccagtaacaaacgcgcaccctgcgccagggttttctccacctgatgatgcagctcatcacgtaaatcaaaacgagccattggtccgagagcgttctcttcatcacggggatcgcccattttcaaggctgccgcagctgccacaaaacgttcggtaaatgcagaagcaattccctcttcgataataaagcgttttgccgctgcacatacctgtccggtattctgataacgtccggctaccgccgctttcaccgccagttccagatcggcatcgttaagcacaataaacggatccgaaccgcccagttccagtacgcattttttcagtgccgctccagcctgtgcgccaatagccgctccagcacgaacacttccggtcaccgtgacagcagcaatgcgcgagtctttaatcatctgactgacaccgtcgttgtcggcattcagccagccatatacgccttgcgggatccccgcatctttaaacacctgggcaatgagctgagcacagcccatcacattcggcgcatgtttaagtaagtagccgttacctgcaagaatgatgggaaccgcgccacgcatcacctgccataacggaaaattccacggcataatcgccagaatcgtccccaacggtcgatactcaataaccgcctgctgattttccaccagcgtaggttccgccttcagcattgccggaccatgttctgcataccagtcacacaaattcgccgatttcgccacttcagcgcgcgcctggttgattggtttgcccatttcgcgggtgatcatttgcgccatttcttcgttacgggcgagcagagccttaccgatatcacgcagtttttcggcacgataatctatatttgtctcacgccagtcgcgaaagccagctgccgccagctgaagtgcgttttcgatatcgtcagcgccagcccacggcagcacagaaagttgttcaccgttggcaggatttatcgaaattgcatgagttgccggagtaatggtcatcggggtatctcctttatgagtcatggtatgaagatacgcagatttactcttgctttataatgaataatattaagccacttattcacgaatcgagaatattatggatctgacccaactggagatgttcaacgcggttgccgaagctggcagcataacccaggctgcagcaaaagtgcatcgcgtgccgtcgaatctcactacccgtctacgccagctggaaacagaactgggggttgatctgtttattcgcgagaatcagcgtttacgtctctctcctgccgggcataactttttacgctatagccaacaaattctcgcgttagtggatgaagcgcggagcgttgtcgctggcgatgagccgcaaggtttattttctcttggttcgctggaaagcaccgcagcagtgcgcattccggccacgctggcggaattcaaccgtcgttatcccaaaattcagttttcactttccaccggcccttccggcactatgctggaaggggtgctggagggaaaactgaatgcggcatttattgatgggcccattaaccatactgccattgacgggataccggtgtaccgcgaggagttgatgattgtcacgccacaaggacatgcgccagtaacccgtgccagtcaggttaatggcagtaacatttatgccttccgcgccaattgttcgtatcgtcgccacttcgagagctggtttcatgctgacggtgccgctccgggaactattcacgagatggagtcttatcacggaatgttggcctgtgtggtcgcaggagcaggcattgcgcttattccacgctctatgctggaaagtatgccggggcatcaccaggttgaagcgtggccgttagctgagcaatggcgttggttaacaacatggctggtctggcgtcgtggtgcaaaaacgcgtccgcttgaggcatttattcaactactggatgtgtctgactcggcaaaacagagttagcaatgagctatttttgatagttcttgcggctaatatgctctatatagtgatgttccgatgacttatgactatatggggcaaatatggttacgccagtaagcatcagcaattacatatctcttcctgatgattttcccgttcgtaatattgcaccacaggtaaaagaagttttaaaggattttattgatgcactcagtactataatatgtgatgaagagtggcgcacgtctttaaacaccaactcagccacaaaaaagatatttaacaaccttgataacttatcatatattcagaggacttcttttcggggcaacgacacactatacaatgaaaaggttcagtttaaactcacttatcccgccaggaatggaagacacaaagaaaatattgaatttcaggtagtaataaatttaagccctatttatttagataattttcgccatgatggagaaattaatattttttgcgctcccaacccaaagcctgtcactatggggcgcgtatttcagaccggcgtcgagcgtgtactctttctgtttctgaatgattttattgaacaatttccaatgatcaaccctggtgttcccatcaaaagagcgcatacaccacatattgaacccctgccttcggatcaccataccgctgcagattacttacgccagtttgatttgcttgtcctgaattttatctctcgcggtaattttgtcatactcccccgattatggaataactctgaggttcacagatggttcgtcaataaagatcctaacttgatcaccgccattctcgacataacggacagcgaattaaaagaggatttgttgcaaagcctgatggattcattaggttctaacaaacatgtactacccgaagtctgcatctgctttttatcccttttagcagaacaagaatctcctcattttcagaacttgtttttatttttcgccaatatgttattgcactatcaccaatttatgaatcccaatgaaagtgatttgaatgacgtgttgatgccagcatcattaagtgatgataaaattatcaaacatatggcgcgcaggaccctcaaactgtttgtaaaaaatgaaacaccgccaaaagttactcacgaagacctggtgaaaaacaggcctcgctcccctgtcagaccacctatacccgcaaccgccaaaacgccagacctccctgaacgtcattaaaccgtgatgttaccgactctctgacgcgtgaaagaatcagcgtcagagaaacggaaaacgcgatccagatcacaaatgcattgtattcacatcattaaccgttttaagatcatttcatcactttttcgcaactcacccgataatctgttatgacaacaaacactgtttcccgcaaagtggcgtggctacgggtcgttacgctggcagtcgccgccttcatcttcaacaccaccgaatttgtccctgttggcctgctctctgacattgcgcaaagttttcacatgcaaaccgctcaggtcggcatcatgttgaccatttacgcatgggtagtagcgctaatgtcattgccttttatgttaatgaccagtcaggttgaacggcgcaaattactgatctgcctgtttgtggtgtttattgccagccacgtactgtcgtttttgtcgtggagctttaccgttctggtgatcagtcgcattggtgtggcttttgcacatgcgattttctggtcgattacggcgtctctggcgatccgtatggctccggccgggaagcgagcacaggcattgagtttaattgccaccggtacagcactggcgatggtcttaggtttacctctcgggcgcattgtgggccagtatttcggttggcgaatgaccttcttcgcgattggtattggggcgcttatcacccttttgtgcctgattaagttacttcccttactgcccagtgagcattccggttcactgaaaagcctcccgctattgttccgccgcccggcattgatgagcatttatttgttaactgtggtggttgtcaccgcccattacacggcatacagctatatcgagccttttgtacaaaacattgcgggattcagcgccaactttgccacggcattactgttattactcggtggtgcgggcattattggcagcgtgattttcggtaaactgggtaatcagtatgcgtctgcgttggtgagtacggcgattgcgctgttgctggtgtgcctggcattgctgttacctgcggcgaacagtgaaatacacctcggggtgctgagtattttctgggggatcgcgatgatgatcatcgggcttggtatgcaggttaaagtgctggcgctggcaccagatgctaccgacgtcgcgatggcgctattctccggcatatttaatattggaatcggggcgggtgcgttggtaggtaatcaggtgagtttgcactggtcaatgtcgatgattggttatgtgggcgcggtgcctgcttttgccgcgttaatttggtcaatcattatatttcgccgctggccagtgacactcgaagaacagacgcaatagttgaaaggcccattcgggccttttttaatggtacgttttaatgatttccaggatgccgttaataataaactgcacacccatacataccagcaggaatcccatcagacgggagatcgcttcaatgccacccttgcccaccagccgcataattgcgccggagctgcgtaggcttccccacaaaataaccgccaccaggaaaaagatcagcggcggcgcaaccatcagtacccaatcagcgaaggttgaactctgacgcactgtggacgccgagctaataatcatcgctatggttcccggaccggcagtacttggcattgccagcggcacaaaggcaatattggcactgggttcatcttccagctcttccgacttgcttttcgcctccggtgaatcaatcgctttctgttgcggaaagagcatccgaaaaccgataaacgcgacgattaagccgcctgcaattcgcagaccgggaatcgaaatgccaaatgtatccatcaccagttgcccggcgtaatacgccaccatcatgatggcaaatacgtacaccgaggccatcaacgactgacgattacgttcggcactgttcatgttgcctgccaggccaagaaataacgcgacagttgttaatgggttagctaacggcagcaacaccaccagccccaggccaattgctttaaacaaatctaacattggtggttgttatcctgtgtatctgggttatcagcgaaaagtataaggggtaaacaaggataaagtgtcactctttagctaaccttgcatcgcattgaccaaaacttgaaccgatttagcaaaacgtggcatcggtgaattcattcatttgacttatacttgcctgggcaatattatcctctgcaactaattacttgccagggcaactaatgtgaaaagtaccagcgatctgttcaatgaaattattccattgggtcgcttaatccatatggttaatcagaagaaagatcgtctgcttaacgagtatctgtctccgctggatattactgcggcacagtttaaggtgctctgctctatccgctgcgcggcgtgtattactccggttgaactgaaaaaagtgttgtcggtcgacctgggagcactgacccgtatgctggatcgcctggtctgtaaaggctgggttgaaaggttgccgaacccgaatgataagcgcggcgtactggtaaaacttaccaccagcggcgcggcaatatgcgaacaatgccatcaattagttggccaggacctgcatcaagaattaacaaaaaacctgacggcggacgaagtggcaacacttgagcatttgcttaagaaagtcctgccgtaaacaaaaaagaggtatgacgatgtccagacgcaatactgacgctattaccattcatagcattttggactggatcgaggacaacctggaatcgccactgtcactggagaaagtgtcagagcgttcaggttactctaaatggcacctgcaacggatgtttaaaaaagaaaccggtcattcattaggccaatacatccgcagccgtaagatgacggaaatcgcgcaaaagctgaaggaaagtaacgagccgatactctatctggcagaacgatatggcttcgagtcgcaacaaactctgacccgaaccttcaaaaattactttgatgttccgccgcataaataccggatgaccaatatgcagggcgaatcgcgctttttacatccattaaatcattacaacagctagttgataacgtgacaacgtcactgaggcaatcatgaaaccacttttatccgcaatagcagctgcgcttattctcatttccgcgcagggcgttgcggaacaaaccacgcagccagttgttacttcttgtgccaatgtcgtggttgttcccccatcgcaggaacaaccaccgtttgatttaaatcacatgggtactggcagtgataagtcggatgcgctcggcgtgccctattataatcaacacgctatgtagttattgtcaggctctgatcacagagcctgacatctccgtaatatcttcctgaagtctcaaatattttcgccattgttggcgatgagatcccgataccagtaaaacgacgctttacgtatccgttccagcgttcccttcccttcgttgtctttatcgacataaatcattccgtagcgctttttcatttcccctgttccagcagaaacaaggtcaatgcagccccacggggtgtagccaattaagtcaacaccatcttcgactacggcttttttcatttcccgaatatgggaagcaaagtaatcaatgcgatagtgatcgttcaccgtgccgtcagcttgtctctggtcaaccgcaccaaatccattttcgacaataaacagcggcaattgaaaatgatcccagaaccagttgagtgaataacgtagccctgccggatcaatttgccatccccattcggatgtatcgatataagggttgctgaccaaatctcgtggttcaacataatccagttgcgggttatcgggcgaaaattgtgtcgtaaaagacatgtagtagctaaaaccgataaagtcgacacatccactggcaagaatcgcgttatcttctggtgtgatatcgaggttgaatcctttcctggcaaagtaattcagcatatgttgcggataatatccacgagcatgaacatcagtaaaccagtaacgacgatgcatcgctttcgtggccatcatcatatcgttgggtgcacacgtcagaggatagatgggacacatggcgatcatacagccaatgttaaattcaggattgatcgattttccagtctgtaccgccagggcactggcaactaactcgtaatgtaccgcctggtacattatttgttcgcgctcattgatatcttcctctggcgaatacaagataccggaattagtaaatggacacaggctttcgctgaaattcacctgattattgatttcgttaaacgtcatccagtactttactttttctttatagcgcgtgaagaccgttgatgcgaagcggataaaaaagtcgatcagtttacggtttcgccagccaccatattttgtcaccagatgataaggcatctcaaaatgtgaaagcgtcaccacaggttccattccctgcttaaggcattcatcgaacagatcatcataaaatcgtaaaccctcttcattcggctcctgttcgtcaccttgcggaaagattcgtgtccaggcaatggaagttcgaaagcatttgaatcccatctcggcaaataactgaatatctgttttatagcgatgataaaaatcaattgcttcatgattgggataattaagcccgtcgataacgccttctgtcacttcacgcggtaccccgtgagcgccagcagtcatcacatcagcgatactgatgccttttcctccttcactccagccaccttccaactgatgcgcggctaccgcgccgccccataaaaaaccttttttaaatcctgacatacacaactccttaactaaaatagattaccaccagacttccgcctggatgccggccataaactcgtctttgctgttctcattaaacttaaaattcgataattcgttatccagaatattgatatacgttccatagaagcgaatttctggtcgtgaacctaaaatgctttcacccactttcaatgcatgccagagtgtcgttttataagccgattcatttagtgtcacaccctgctgagttttgttctgttgcttaaaccagcctaattcaagccccgtctgattccatgtattccagatccaggccggtcttattacagtgcgaatactgtcaaaatcactatgagcgccactttcataactataaacatcttcgccgtgagaatagacaagcgcgttagccataataatattgtcagtaagatacatctcgccctgagagattaaacgccaggcgatcccattggtatggtcaccatagtaatagcgaccgtgcgccatcgtattactggcatctgagaaactggcaaaactgctggcataggaattattggcaacctgtaacgtaaattcattaaacgtatcgcgttgcaggttttgccgtaaaacagaagtcagcatccagctatctttcatttcaaaataactgtcgtcattttcgttatcttgttgttcatccgttttattaggtgcggaatatttagccattaatgataatgtcgcatcatcccataacgggatattgcgataacgaacatccacagaattggtattcatctggctggtacgcgaaaaatcacgagagtaaacatcgacatcatcacggcttaaggacatatcaaacagccctacaccaagtgcccagttttcaatccccacacccgcggcgacatccgtggttaaggttttccagtccagcatctggatctcatattgcgggagtttatgtttgccgacccagaagtctgcctctggtgcgaagggtaaaaaacctcgcgttgtcaggtaaatatcgctgaactgcatgatattttcattggcactgtcaccaaaccaggcatcgttatactgctcacccacgttgccatcataggtaacgaccgcatttgccgttttaccgtcctgattataaacacgctgatttaaggtcaggtcaaaccaaccgctcatctcattaccaaaacgtcccagagaacccgctgcataagtttgtggtgagccgtgattaccagtaccccagcctgagcggaagtacccctgatagctgaacccaatatcatcctttatatatttactgatatctttcagggtcacgctttcgatagtggttttgtcgcctttactttcaataacggcaacttgctgcgatccatttatagtatgcgctgcggtaaccgagttctgttcaccgttttcatttttgatgttatcagcgacgggagatgtcgctgatatttcagcaagcgaggctgatttatatttgttttccgtgatgcttttttgtaaggtcgaaagtcgggatttatatactcccagttcattctgtgttgctttcagctcttgtttattttgcgacaattcattttcaagcaattcaaggcgctgctctatggttaattttgttgccatcgcgttcaatggaaacaatgctgtaataatagaaaaagacaaaaggctgacgttaagcgtctttatattcatgacttatccttaagagagtaataatttcctccagctatcgcactggaggaaaaaatcaggcatggagttcttttcttaatgaaataatttccctggctaaatcctggcataatattgcattcatcaaatgatcctgtgcatgaaccagaattaaattaacttttattttgccacagccttcatcctgactaattaatgcggtctgaatcttatgtgcctgaagacaggcagattcagaactggccattagctgagttgcgccctgccagtctttttgcccggcacaacgtatggcttccatcgcgtcagaacgtgcctgccccgcgttgaccagtaactccataacaagttcttcatctgcaaacatcacaatctccttcctgggtaaatggaattatccgttagttgtcatgttattgactttgttggcggcaataacaaaaggtaaatagatcattgtcgccacacctaaacataaaaaaccaaccagtaaagccagccagtttcccccggttccgaggaaagcaattaaaggtccgggcgtagtccagggcacggcataagcaaccggtggaataatttccatcgaaacaaagaagtaaccaatggcacagttaacaatgggaaccataataaacggcaccatcatgatggggttaagtacaataggaaggccaaacattatcggttcattgatattgaaaataccggggataaatgacatttttgccagatcacggtattccgcacgcttagaagcgataaaaatagccaacaataaccccaacgtcatacctgaaccgccgcagttggcgaatgcatcattgatagaagtccaggtaatcggatatggcgcgccccaggtagtgccgtgttgagcggcccaggagagattctccagattagcctcagaaaaaacagtttctcgaattgccgacgtggtattagctccgtggatccctagcacccacaggaaattacccacagctcccaggataattaccgcaaagatattcgttcccatatgtttgagcggcgtctggattaatgtgtaaataagatcgtttaatcctgccggggatatcagtgtcaggcaataattaagtgcggaaaagaacaccatgacaaaaaatattggcaataaaactttaaatgaacgcgctaccgcaggcggtacagctgccggcatcgttatggtgatttttgggtttcgagctaagcgacaaaatatttcactggtgatcaatgcaacgataacagcaacaaacaacccctgcgcgccgagatatttggtcgtcagaaatgcttgcccatctatcatctgatatggtgtataaacaataaaaaaggctcctattgccgttaatccgcataaaagatcatcttgctcatagctaatcgccatattcctggcgaccaggaaagcaatcataattgacatgatatttacagaaccattcattaccggagtaaaaatagattgtgctttttcaaggttggggaaaatgctgttcagatgcagtaatccggcaataaaactgtctggcgataatatggcaaagttaattaatataattaatgaacttgccatgataattggaaacgtaaaaacgaatccatctctcaccgctgcaacatgtttttgtgagtttaacttgatagcaactggaacaagaaaacgttccattccacgttcgaatgaggccattaatcccatttttttatacctgctgttctggatatttatacatcccaataaagtatgtatggcatatccattttatgatgtgtgaaaagttagttcaggtaatagtttaataatattagattcttactgttgcagtagtttcatcgcaaattcaagaactgcctgtccgttcatagtgccatagtctttcatctcgataacggctacaggcattttcccctgtgcaacggcttcaatctccggtttctgaaagcgaacttgcgggccaagtaaaacaacgtcaacttcgttatttttaattttccctttagcctctgcaatcgccaatgcggaaatattaacttcaagtgaaatagcgttagcatgatcaatcatacgtttaaccagcatactggttgacatgcccgcagcgcaaactaacaatatctttttcatattttcccttactggtatataacagactacattgtgtaaatatcatatcccgcagtagctatacatcctggtacattgatcacagtaatacagtaataaagttgttcaacatcagggtgataattaaacgactcggccatacgataaaccaatcaggactcaaccccttgttttcaatggctcttaaaaggtgcaaaagtgatttttcaaaagattgcccgcttacttaaatccgagatcaatggctattcatggcatgttggtgatttgttgccgtcagaagctgaactcgctgttcgttataatgtttcgcgtaataccctgcgtaaggcattatccttgctggaaggcgaaggaattattcacagaaagcatggttcaggaacatacattaaaaaaaagaattttgttgcacacattgatcacatgaacagtttcagtgaaattgcgcataaaagcggcaaagaggcagggagtcagattatgaaatttgaagtgcaggatgcttcacccactattgcgactgagctgaatttagtgactggtgagcaggtttattacataaagagactgcgatttattgaggataatgcagcacaattagaagaaacgtggatgtcagtggcacgttttcctgatttaaccgtagcacatatgcaaaaatccaaattttcgtatattgagaacgaatgcgggatcaaaatcattggcacctttgaaactttctcccctacttttcctaccccagaaatcgccagtattttacggatcagcccacgggatcccatacttaaaattcagacccaggctgtggacagtaactctattccgctggattattcgttactttacagcaatattttcgagttccaggtaaagtactttttcccgcgataaaagcagacgcacagagtgctgacatcacattctgtgcgtatggtttagcctctaacctttaccgctttacgccaccgcaagccaaatacattgatatacagcccggtcataatgagcaccgcacctaaaaattgcagacccgttaagcgttcatccaacaatagtgccgcacttgccagtcctactacgggcaccagtaacgataacggtgcaacccgccaggtttcatagcgtcccagtaacgtcccccagatcccataaccaacaattgtcgccacaaacgccagatacatcagagacaagatggtggtcatatcgatagtaaccagactgtgaatcatggttgcggaaccatcgagaatcagcgaggcaacaaagaagggaatgattgggattaaagcgctccagattaccagcgacatcaccgccggacgcgttgagtgcgacatgatctttttattgaagatgttgccacacgcccaactaaatgctgccgccagggtcaacataaagccgagcatcgccacatgctgaccgttcagactatcttcgattaacaccagtacgccaaaaatcgctaaggcgatccccgccaattgtttgccatgcagtcgctccccgaaagtaaacgcgccaagcacgatagtaaaaaacgcctgtgcctgtaacaccagcgaagccagtccagcaggcataccaaagttaatggcgcagaacagaaaggcaaactgcgcaaaactgatggttaatccataccccagcagcaaattcagtggtactttcggtcgtgcgacaaaaaagatggccggaaaagcgaccagcataaagcgcaaaccggccagcatcagcggtggcatgttatgaagccccactttgatgaccacaaaatttagcccccatacgaccactaccagtagcgccaacaccccatcttttcgcgacattctaccgcctctgaatttcatcttttgtaagcaatcaacttagctgaatttacttttctttaacagttgattcgttagtcgccggttacgacggcattaatgcgcaaataagtcgctatacttcggatttttgccatgctatttctttacatctctaaaacaaaacataacgaaacgcactaccggacagacaaatgaacttatccctacgacgctctaccagcgcccttcttgcctcgtcgttgttattaaccatcggacgcggcgctacgctgccgtttatgaccatttacttgagtcgccagtacaacctgagtgtcgatctaatcggttatgcgatgacaattgcgctcactattggcgtcgtttttagcctcggttttggtatcctggcggataagttcgacaagaaacgctatatgttactggcaattaccgccttcgccagcggttttattgccattcctttagtgaataacgtaacgctggtggtgctcttttttgcccttattaactgcgcctattccgtttttgctaccgtgctgaaagcctggtttgccgacaatctttcgtccaccagcaaaacgaaaatcttctcaatcaactacaccatgctcaacattggctggaccatcggtccgccgctcggcacgctgttggtgatgcagagcatcaatctgcccttttggctggcagctatctgttccgcgtttcccatgcttttcattcaaatttgggtaaagcgcagcgagaaaatcatcgccacggaaacaggcagtgtctggtcgccgaaagttttattacaagataaagcactgttgtggtttacctgctctggctttctggcttcttttgttagcggtgcatttgcatcatgcatttcacaatatgtgatggtgattgctgatggggattttgccgaaaaggtggtcgcggttgttcttccggtgaatgctgccatggtggttacgttgcaatattccgtgggccgccgacttaacccggctaacatccgcgcgctgatgacagcaggcaccctctgtttcgtcatcggtctggtcggttttattttttccggcaacagcctgctattgtggggtatgtcagctgcggtatttactgtcggtgaaatcatttatgcgccgggcgagtatatgttgattgaccatattgcgccgccaggaatgaaagccagctatttttccgcccagtctttaggctggcttggtgccgcgattaacccattagtgagtggcgtagtgctaaccagcctgccgccttcctcgctgtttgtcatcttagcgttggtgatcattgctgcgtgggtgctgatgttaaaagggattcgtgcaagaccgtgggggcagcccgcgctttgttgatttaagtcgaatacaataaaaatttaattcagccttcgtttaggttacctctgctaatatctttctcattgagatgaaaattaaggtaagcgaggaaacacaccacaccataaacggaggcaaataatgctgggtaatatgaatgtttttatggccgtactgggaataattttattttctggttttctggccgcgtatttcagccacaaatgggatgactaatgaacggagataatccctcacctaaccggccccttgttacagttgtgtacaaggggcctgatttttatgacggcgaaaaaaaaccgccagtaaaccggcggtgaaagcttgcatggatagatttgtgttttgcttttacgctaacaggcattttcctgcactgataacggatcgttgacacagtagcatcagttttctcaatgaatgttaaacggagcttaaactcggttaatcacattttgttcgtcaataaacatgcagcgatttcttccggtttgcttaccctcatacattgcccggtctgctcttccaatgaccacatccagaggctcttaaggaaatgcgcgactgacacctgctgtcacggtaatgttgatatgcccttcagaatgtgtgatggcatggttatcgactaactggcaaattctgacacctgcacgacatgcttcttcatcattagccgctttgacaataatgataaattcttcgcccccgtagcgataaaccgtttcgtaatcacgcgtccaactggctaagtaagttgccagggtgcgtaatactacatcgccgattaaatgcccgtaggtatcattaaccaatttaaatcggtcaatatccaacaacattaaataaagattcagaggctcagcgttgcgtaactgatgatcaaaggattcatcaagaacccgacgacccggcaatcccgtcaaaacatccatattgctacggatcgtcagcaaataaattttgtaatcggttaatgccgcagtaaaagaaagcaacccctcctgaaaggcgtcgaaatgcgcgtcctgccagtgattttcaacaatagccagcattaattcccgaccacagttatgcatatgttgatgggcagaatccattagccgaacgtaaggtaattcatcgttatcgagtggccccagatgatcaatccaccgaccaaactggcacagtccataagaatggttatccgttatttctggcttactggcatctctcgcgaccacgctgtgaaacatactcaccagccactggtagtgggcatcgatagccttattgagatttaacaagatggcatcaatttccgttgtcttcttgatcattgccactcctttttcacagttccttgtgcgcgctattctaacgagagaaaagcaaaattacgtcaatattttcatagaaatccgaagttatgagtcatctctgagataacattgtgatttaaaacaaaatcagcggataaaaaagtgtttaattctgtaaattacctctgcattatcgtaaataaaaggatgacaaatagcataacccaataccctaatggcccagtagttcaggccatcaggctaatttatttttatttctgcaaatgagtgacccgaacgacggccggcgcgcttttcttatccagactgccgctaatgttgatcatctggtccggctgaacttctcgtccatcaaaaacggccgcaggaataacaacattaatttcaccgctcttatcgcgaaaaacgtaatggtcctctcctttgtgagaaatcaaattaccgcgtagtgaaaccgaagcgccatcatgcatggtttttgcgaaatcaacggtcattttttttgcatcatcggttccgcgatagccatcttctattgcatgaggcggcggtggcgctgcatcctgttttaaaccgccctggtcatctgccaacgcataaggcatgacaagaaaacttgctaatacaatggcctgaaatttcatactgactccttaattgcgtttggtttgacttattaagtctggttgctatttttataattgccaaataagaatactaccaattgttataaggcatttaaaatcagccaactagctgtcaaatatacagagaatttaactcactaaagttaagaagattgaaaagtcttaaacatattttcagaataatcggatttatatgtttgaaattattatattggacgagcatacagaaaaagcaaatcacctttacatataaaagcgtggacaaaaaacagtgaacattaatagagataaaattgtacaacttgcagataccgacactattgaaaacctgacatccgcgttgagtcaaagacttatcgcggatcaattacgcttaactaccgccgaatcatgcaccggcggtaagttggctagcgccctgtgtgcagctgaagatacacccaaattttacggtgcaggctttgttactttcaccgatcaggcaaagatgaaaatcctcagcgtaagccagcaatctcttgaacgatattctgcggtgagtgagaaagtggcagcagaaatggcaaccggtgccatagagcgtgcggatgctgatgtcagtattgccattaccggctacggcggaccggagggcggtgaagatggtacgccagcgggtaccgtctggttcgcgtggcatattaaaggccagaactacactgcggttatgcattttgctggcgactgcgaaacggtattagctttagcggtgaggtttgccctcgcccagctgctgcaattactgctataaccaggctggcctggcgatatctccaggacagccattggtggtgtttatatgttcaagccacgatgttgaagcatcggcataatctgaggagccttaccgcgccattgtcgatacaggcgttccagatcttcgctgttacctctggaaaggatcgcctcgcgaaaacgcagcccattttcacgcgttaatccgccctgctcaacaaaccactggtaaccatcatcggccaacatttgcgtccacagataagcgtaataacctgcggcatatccgccaccaaaaatatgggcgaaataactgctgcgatagcgtggcggtatagcaggaagatccatattttccgccaccagcgcccgcaattcgaaatcatcgacatcctgcattgcttcgttttcttccaggcaatgccagcgcatatcgagaagtgcggcgctaagcagttcgctcatctcataccctttgttgaacaggctggcattacgcattttctgttgcagttcgtcaggcattgctgccccgctctgataatgccgggcgtagcgagcgaatacctgcggatgcgttgcccagtgttcgttgatttgcgacggaaattcgacaaaatcacgcggcgtgttggtgccggaaagcgtagcataacgctggcgggcaaaaaggccgtgcagtgtatgaccaaattcatggaataaggttatgacatcatcccagagtaacaacgcaggctcaccggcagcaggtttctgataattgcagacgttataaattaccggatgcgtttcattaagcgttgattgctcaacaaaattgcccatccatgcacctccgctttttgaatcacgggcgaagaaatcaccgtaaaataacgccagtcccacgccattatgatcaaaaatttcccacacacgaacgtcaggatggtagacaggaatatcaaaacgttcgacaaaattaataccgaagagctgattcgcggtccagaatactccttcattcaacaccgtgtttaattcaaaatatggtttgagctgcgcctcatcaagatcaaatttctcccgccgtacctgttccgcataaaatgcccagtcccacggctgcgcggtaaacccgccctgctgcttatcgataaccgcctgtatggaggctaattcatcgcttgcacgttgacgcgccgctggaacaatttcccgcataaagttgagcgctgcttcaggtgtttttgccatctgatcggcgattttccatgcggcataatgaggaaaaccaagtaatgtagcctgttgtgcacggatctccaccagacgttgaatgatagcgcgggtatcattggcatcatttttttccgctcgcgtccagcccgcaataaacagtttttcacgcgtcgcacgatcgcgcatctcggcaagcgccggttgttgggtggtattcagcagcggaatcagccatttgttatccagacctttctcgcgagccgcctctgccgccagcgcaatctcttgctcactcattcctgccagctgcgcgatatcgttcacaaccagaccgccggatttatttgctgccagtaatcgctggttaaactggctggtcagggtcgcagcttctgtattcagtacttttaattttgctttatcagcttgcgcaagtttggctccggcaaggacaaaacgttgatgaatcacctccaccaggcggatggattcactatcaagccccagggattcacggcgttgccagacagcatctacccgcgcgaataattcaccgttcagatagatatcattagccagttccgccagttcagcggaaaactgctcgtcaagacgctgtaattcatcattcgtatgcgccgcagtcatcgcaaaaaagacgctggtaacgcgggtaagtaattctccgctttgttccagcgccagaatagtattgttgaaatcaggtgtttgcgggttaagcgcaatagcggcaatttctgcccgtttttgctgcattccctcatcgaatgccgggcgatagtgatgattggcaatttgatcaaaatggggagccagatacggcagtgtgctttgcacaaggaaaggattcattgttgtcattttcttctcctgaacgcgaggtgttccatagcgtaggcttactgataacggagtgcaatcttgcaaaccagtattacccgctcttaagcatcacgtgctatgttattgacacacaaaagcgttgaggaacagtgagatgatcgttttagtaactggagcaacggcaggttttggtgaatgcattactcgtcgttttattcaacaagggcataaagttatcgccactggccgtcgccaggagcggttgcaggagttaaaagacgaactgggagataatctgtatatcgcccaactggacgttcgcaaccgcgccgctattgaagagatgctggcatcgcttcctgccgagtggtgcaatattgatatcctggtaaataatgccggcctggcgttgggcatggagcctgcgcataaagccagcgttgaagactgggaaacgatgattgataccaacaacaaaggcctggtatatatgacgcgagccgtcttaccgggtatggttgaacgtaatcatggtcatattattaacattggctcaacggcaggtagctggccgtatgccggtggtaacgtttacggtgcgacgaaagcgtttgttcgtcagtttagtctgaatctgcgtacggatctgcatggtacggcggtgcgcgtcaccgacatcgaaccgggtctggtgggtggcaccgagttttccaatgtccgctttaaaggcgatgatggtaaagcggaaaaaacctatcaaaataccgttgcattgacgccagaagatgtcagcgaagccgtctggtgggtgtcaacgctgcctgctcacgtcaatatcaataccctggaaatgatgccggttacccaaagctatgccggactgaatgtccaccgtcagtaatttttatacccggcgtaactgccgggttattgcttgtcacaaaaaagtggtagactcatgcagttaactcactcacaagcaagaacgaatgaccgtcgaaacgcaacttaatcccacacagcctgtcaatcagcagatttatcgtattcttcgtcgcgacattgtccattgcctgattgcaccaggcacaccgttgtcggaaaaagaagtttctgttcgtttcaatgtgtcacgccagccggttcgtgaagcctttattaaactggcggaaaacggcctgattcaaattcgtccgcagcgtggcagctacgtcaacaaaatttccatggcccaggtgcgcaacggcagttttatccgtcaggccattgagtgcgcggtggcgcgtcgggcggcgagcatgattaccgaaagccagtgctaccaactggaacaaaatcttcaccaacaacgcattgccattgagcgcaagcaactggatgatttttttgaacttgatgacaacttccatcaactcctgacgcagattgccgactgtcaactggcgtgggataccattgagaacctgaaagcaaccgttgatcgcgtgcgctatatgagtttcgaccacgtttctccaccagaaatgctgttacgccagcatcttgatattttctctgccctgcaaaaacgtgatggcgatgcggtagaacgtgcaatgacgcaacatttgcaggaaatcagcgaatccgtgcgccagatccgccaggaaaacagcgactggtttagcgaagagtaattcatttcctctcatcccatccggggtgagagtcttttcccccgccttatggctcatgcatgcatcaaaaaagatgtgagcttgatcaaaaacaaaaaatatttcactcgacaggagtatttatattgcgcccgttacgtgggcttcgactgtaaatcagaaaggagaaaacacctatgacgacctacgatcgtaaccgtaacgcaatcaccactggcagccgtgttatggttagcggcaccggtcacactggcaagatcctgtcgattgatactgaaggtctgaccgctgagcaaatccgccgcggaaaaaccgtagttgttgaaggttgtgaagagaaactggcaccactggacctgattcgtctcggcatgaactaagcgtgtgaatgccgccgatggcggcattgctttttttacttcacggaatattttgccacggtcgctttcgcgccatgcgctaataaagacaagtacgcttccgtcacttttgcagtaaacaagctattgtctggcaaatcatcaccaaaaatcgcctgaatcgccagcaatgactggacgcgcgctttcccttcggcactactttgtacagccttctgaataacaggtaacagtgggtcactgatttcaatcggatttccctgttcatcaacaccaccgacataacgcatccaacccgcgacgcccagtgccagcagatcgaacttgctgtcatgcgccagatgccagcgaacagaatccaacatccgctgtggcaatttctggctgccatccatcgcaatctgccaggttcgatgacgtaacgccgggttgctatagcgttcaattaatcggttagcgtaatcttgcaaatcaacgccctgcactttcagcgtcggcgcttgttcctgcaacatcaagccatacgccgcatgacgataatgttcatcttccatgcagtcattaatgtgctgatatccggcaagataccccagatacgcctggaatgaatgactgccgttgagcatgcgcaacttcatctcttcataaggcagcacatcactaaccagttcggctcccgctttttcccattccggacgtccggcaacaaagttatcttctattacccactggcggaaaggttcacaggcaacgcccgcaggatcgcgcacaccggtaagttgttcgattttcgccagcgtatcctctgtcactgcgggcacaatacggtccaccattgttgatgggaaagtcacgttatcttcgatccattgtgccagttttacatcaacggcttgcgcgtaggaagtgacaacgtcacgcataacatgaccgttttctggcatgttgtcacatgacatgacggtaaatgcgggaagtcctgccgctttacggcgagccagcgcctcaacaatcacccctgttgcggttttcggctggtggggattttgcacgtcggcagcgaccatcgggtgatcgagcattaactgtccggtcgccggagagtggaaataccctttttcggtgattgtcagagagacaatcgcaatttgtggttcacacatcgcagccaacacggtttctaagccatccatctgtacgtgcaaggcttttttaacgacgccaacgacgcgagccgtccacacatcggccgacatttccgcaacggtataaagattatcttgctgttgtaaatcggcaatttgctgttcgccgccgattaagttgacctcataatatccccagtcactgaaatgttctgtagcaagaatatcggcatacacgccctgatgcgcacggtgaaatgcaccaaagcctaaatgaacaattcttggggccaggttattacgatcataaacagggagtgtcgcttttgctgataacaaattatttcccataacaattccttaaatttaaatatggcaagctacatgttttgttatatgaataaaaatcccctctccggtaagagaagggattgaggatttacagacttctggaaggttgcgcagctcttacaacacgcggttgatcttccgcagcgtcttccagcgcacttaaatcacggtctttcacctctggcattttcagcgcagagattaaaccaatcactgaatatgccatgatcataatggcgatcggataccaggattccgtcatggtgcagaaaatacccgccaggataggaccaaaaccggaagcaataagaccaccaatttctttagaaatagccatccgggtaaagcggtttttacagccgaacatttctgccatggtaatgttttccagagcaaataatcccagcaccgcacagttatgaatcacaatcagtgcaaccataatggtgctcggggcatagcttttatctacgatgatagaaagcattggccatgccagcacaatcgcggaggtattcataataatatacgggatccggcgaccaattttatcggataaccaaccaaggaacggaatggtcataaagccgagaatcgaactaatcatcaatgcatctgttggaattgctttgttaaacaataacgtctgcactaaatagcctgcaaggaaagtctgaattaaaccggagttacccgcctgaccaaaacgcagccctgttgccagccagaaggatttgctctggaacatgctaccagcaggtgcaggttttgctgtcggttggttactgtcattaaccttctcaaagaccgggctttctttcagattcatacgtaaccagatagcaaagaccatcacgacaacgctcgccaggaacggtatacgccatccccacgccagcagttcctctttactgagaatgaagaacataaaggcccagattgccgttgcgctcaaggttccgcagttagttcccatagctacaaatgaggagataattccgcgcttaccttttggcgcatattccgccagcatcgtaccggcaccggaaatttccgcacctgcacccaatccctgaataatacgcagcgtcaccagcaagatgggggcaaaaacaccaatctgtgcataggtcggtaacacaccaattaaggtggtacagatccccatcatggtgatggtaataaagagcacttttttacgccctattctgtcgcccattttgccgaaaataaatgctccgacaatacgcgccacataacctgcaccgtaggttcccattgccaaaattaacgccattgccgttgatgattcaggaaaaaatatttcatgaaacactaacgctgcgccgagcgaatataactggaaatccataattcacaggtgttttttcccatcctgtggtttccttggcgttttctaggttttttcagatagttgcatttttttaaaagcatcctaagttcgatctcagtgtctatctggggcctatttctgtcccatatatgccccaaaaaactccccaacagataagtagttttttcatggatttacgcgtaaaatcaataacggctggaaatcattcaatactcgcactatcgaaaaatttaccagccaaccgcagcacgttcttgcataaggtgtgtctgcggtttttcaactattcagatacattactcccatcacattcattcctccacatcaaaggcatataggctatatcaccttgatatttttcttcttcagataaaaactgttatctatgtatacttttaaacccaatccgtgtagagtctctgcataagatagtttgcagttgccacttcagattgcgccataaaccgcctgatttttgccgccacctgttagcattcctgtatacctgaaacgacaatgtttatctacgaactttaagaacacccaagataaaattgtcaactatatcatatataacacattactaattcgaggctatatgaacagcatactgataatcacttctctccttatcatattcagcatttttagtcatgccctaataaaattagggattggcatatccaataacccagacaaaaccgatgtataagtcaacatatcctgaatcagacatacaatatcgcaatgaaaatcaataatattttaaggaatatcttcatgaaatcaaaagacaccctaaagtggttccctgcgcagcttcctgaagtaagaattatcctaggggatgctgtagtggaagtagcaaaacagggaagacctatcaataccagaacattgcttgattacattgaaggaaacataaagaaaaaatcatggctggataacaaagaattattacaaacagcgatatcagttcttaaagacaaccaaaatttaaatggtaaaatgtaatataataaacttacttttttatcatttttccactttaacaacattttgctccacttttccacgaccaaacaacttgaaatctggttaaaataacacgcaacactattcttcttccttgagtccgcccggaactcgaaaaacaaaccgagttaaagccatttttcacaaaatcgattttgggtctcaccaaagttacggggttgcatacgcattcgtttattttcgaacgtgtacatacaaatatgcacaaaaataatcaaaattattttctgagatgcattatgatatgaacaccaatttcgtatagagtctcactatgtctcgaatttttgcttactgtcggatatcaacgctggatcagaccaccgaaaatcaacgccgggaaatcgaaagtgcaggttttaaaatcaaacctcagcaaataatcgaagaacacattagcggctcagcagcaaccagtgagcgtcctggttttaaccggttgcttgctcgcctgaaatgtggtgatcaattgattgtgacaaaactggatcgccttggttgtaatgcaatggatatcaggaaaacagtggaacaactgaccgaaacaggtatcagagtgcattgcttagcattggggggcattgacctgaccagtccaacaggaaaaatgatgatgcacgtaatttcagcagtcgctgaatttgaacgagaccttttacttgaacgcactcattccgggatagtaagagcccgcggcgcagggaaacgttttggtcgaccacctgtgttaaatgaagaacagaaacaggtggtattcgaacgaattaagtcaggtgtaagtataagtgccattgcccgggaattcaaaacctcgcggcaaaccattttaagagccaaagcaaaacttcagacacctgacatataaaaaataatctcggtgtgagatgctttacgtcttccaagcccccttccttgccgtaaatggaaagatacatctaattatagaatttatatgttttaccctacggcagtgctggccattcaatatcctgtgcagttgacgtatcaacacggttcagcaacacccgatactttttccaggcttccagcaatgaggtttcttcctccgttgcgatttccagatctacagcatcctgaagtggcgcaatatgctcactggctacctgcatcaggctgttttttgtttcttccgcctctcggatccggaacagtttttctgcttctgcatctttcacccaggctgtgccgttccacttctgaaactccccttccggcgataaccaggtaacattttccggtaacggaccgagttcagaaataaataacgcgtcgccggaagccacgtcataaaccgttttaccccgatgatcttcaacgagatgccacgatgcctcatcactgttgaaaacagccacgaagcctgccggaatatctggcggtgcaatatcggtactgtttgctggcagacctgtatgaggcggaatatatgcgtcaccttcaccaataaattcattagttccggccagcagattataaatttttatggtccgtggttgttcactcattctgaatgccattacgcaagcctcacaatatagttaaatgcgatgtttttgacggtgttttccgcgttaccagcagcgttaacggtgatggtatgtccatgtgaaccaatcgcaacggagtgcgtatgagcaccaataccgacagtatgtgcgtgtgcacctgcgcttgcagcagtacccgatacagagtgcgtatgagcgcctgcagaagaagtgttaacactgtatttagaataatcaggtgatccacttcccggagcaccactggaaccacctgaaacaaatgtcatcgaatgggtatgtgcaccggctgaagcagccgtaccgctaacactatgggtatgcgcaccagtgttattcgtggatttagtgccgtaatcaaacgacgatgtggttttcgtccccaaatccgtactggatacgctggcgctgtgggtgtgcgatttaatgccgtcctgttcctgagacaatacggcccgaccactggcaggtttgcccttaatcgtccagccacgcatatcagggatcacacctgacggataagcggctgcaagtttcgggtaagcagatttgtcaaaagtctgcccctgcatcagggcataaccagacggaacggtatctgatggccacgggattggtgcgccgactgggtagctttctggtggaagatttttcgaggtataaacttctgcccagtcttcctcaaaaccatagccatctcttgaggaacggtagaacagacctccatttctgtaatgtgccttcatctgcaaggtccggcaacttccgactccggtatagaagttaaccagaatatagctgttgccagagcgggtgacattgtaagcgcctgattcggcattccagggaacggctccatccgaatccgcataagcccccgtcgaacgtcgggcaaatgcaccaatattttccggcgtgaggttaatatccgccgagccatcaaacttaacaccgttaatttttggggctgccgcaagtttcgtcgcggtatcggcgttccccttcagtgccccggtgatcccatcagtaacagacaacggacctgaaatagtccctccagtcgttggcagcgctccaatatctgatggtgtaggtttctgatgtgagctatacatcgtataaacaacaccaccggtaacgctggaaggcttactcgctgaatatgttggcgaggtataaatagaaactgacgcatttgtagtacaatcccaatggatatttacactcgtcgcataattgccaatctcaacgtaaatatcatatgtatcgccggatgtgttgatccaggcgaaattcgttaatccgacggctgtacgcttccacaaagctccggtaatccctttggggtttccattgcctgctcgtagaaccagttctgaaatgcctgcctgctgtggggagccgacgttgtaaccagcgccaccaatcaatgcgatgtaaacgatggaactcgcttgtggcatggtaaccgttgccagtttgaaccaccctgccccgccagagaaagagatcgttactgaatttaaagtgccaatatctttcggtgttaatgttatatccgcagtcagtgctttcccgttaacttttcggttagatggtaccctgccattcgcattgtcattcgctgctttaactgccttcggtgtcgcggcaagcgtttcagatgtgctgttggtcgcactgctgagctgtactatcccctttttcgtcgtacttgcatcctcaagcgccacggcggatgcaatatcctctgcacgttttgccgctgtctcagcgcgcgttgctgcggattctgccgtacttttgctctgtgctgccgctgccgcactgccagcagcctctgtcgccttcgtggatgccgtcgtggcgctgcccctcgctgctgacgcctgtctggtcgcctcatcttttgaagcagacgcagatgatgccgatgacgccgccgaactggcggacgatgcggcagccgtttttgaggattctgcgctggtttccgacgctttcgcgttcgtttcggatgtcttcgctgcggaagcagccctcgctgctgcactggcctgttcagtggcttcgccagccttcgttgtggctgttgaagcggacgatgcggcgctttctgccgattttccggcggcgctagcactggctgaggcctgcccggcacttgttgacgctgcactggcagacgacgcagccgctgtttttgagcctgccgcagctgaggcactctgtcccgctgccgtttcagaagacctggcgttcgtctcggacgtctttgccgccttcgcggaatttcctgccgccgttgccgaggaagcggcactactggcgcttgatgatgcgttcgtttctgatgatttcgctgcctcttttgaggccgccgcatcccgggctgaggtggcagcttctgacgcctttgtggtcgcggcggatgcagaagtggctgcagatttttgtgacgctgccgcattcgtttctgacgttttcgcggcactggcactggtagctgccgcgctttttgaggactctgcagcggcagcactttttgatgcttcagtggcctttgttgatgccgttcctgcgctggaagtcgctgactgagccgacgacgcggcctgtccggctgacgtgctggctgcgcgtgctgagcctgcagcatcagtcgcatgggttgccgcctcacgggctgatgtgctggcatcactggctgacttcttcgcggctgccgtgttctgtgccaccacggacgcgttacgcgccacctcttccaccatcagctcaaaacggcgcagtgcctccggacgggcatcatcctccgtcatggcaccgagaaaatcattcagcgtaccgggtcgggaatcttcatacacggtgatggtcccggcatgtgacggcgggaatccttccaccaacagaataacgctgtactgaccgtactcaacgtccatactgtaacgcccggcttcatccggattttctgaggccagcgtgttcaccaccaccgtggtgctgttacgttttgctttcagctggattgtgcagttctgtaccggttttcctgtgccgtctttcagtacacctgaaatctttactgccatattcaccccacaaaaaagcccgcctgaaccggcgggctgtcataacactgtgttacctggctaatcagaatttataaccgacacccacgatgaaactgttggtacgccagtcaccgctgccggagccttcataagcgacgtcaacggccacggattcggtcgggttaaactgcacgccagctccccacgccagagacgtgttgctgtggcgaccgtcatcacttccggtcagcacatcgtgcgttttccccttgttgtcagttacgcggatataatctccggagaaagtcgaaacacggctgtaagccatacccgccatcgcatacgcgctgaaccattcattcacgcgcacagacggccccgccatcacgctgaaccagcggttacgcacggaatcttcatgccagcgggtatcgctgtaatgcgttttttgctcatcttcagcgttggcataactgaatgacgtaatcagccccagcgtgtccgtaaactcataacggtatttcacgttaatcccgttcagatcatcgctgccgggagcgttcgtacgggcatgaagataccctgcgctcagtgtggcctgctgctcagacgcccatgcaggcgcaccggatacggccagacagatggctgcggacaaaatggctgcacaaactttacgcataattacctctcgcttttctgcaataaaaaaggcgccatttctggcgcccgtatatgggttataaaattcagctgatactgatgcctgcggtggctttcttcatcaccacaaccagcaaatcgctgatacttgctgtgggataccagtcatttaccagccatgctgacaccgaaaactccagcgtcatgtggccgtgaccagctggcatatcaataacaccactgtaaatcagcgtattatccagcgcggtacggttataaatttcagcaccatttttcttcactatcaggcggcatgacgaataaatatcgttattctcccgctcatgtttagcgccgcagaatgccaccgctggaataacaatttgcctgtcaaaaggctgatcgtcataaatcctgacggtaatggtccctgatggccaccgctccggtgcccgggagtcccgcgggaaagccttacccactgttttgacaatatcgccttcaatctgattggctgacagtttccccttaatctgacagttctcattaatcgtgacgttgttgagcgtcccggagttcgcattcacactgccactgatatccgcatttttagcagtcagctttccgtccggtgtcagggaaaatgccggtggatttccaccgctggtaatggtgggggccgtcaggcgtttcaggaacacgtcgttcatgaatatctgatcgccctgaccaacaaacatcggttttgtgttgccattcgcaggattaaccatcgcaatcctgtccgccgccagcagcacctgactctgcatgccgtcaggggtgttctcaataccggcaccaatacccgcgatataaaggcgtccgtcctgcatctgctgcagcttcacagcccacatgctgttcaggttattatttgtatcaacctgaaccttctgtatctgctgaattgccgcactctggtcttccagtttcttattgacggtctgcgtgatttcattgctgacatccgtaatggacgtcctgatttcagccaggtcaggcgcaagctgaccgttatcaatctgcgtccacagctcctgagccagatgggttttccctatctcgcctttgaaaaaatccagatagccggatgcatcatcactcggctgaccaacagcctccacgaatgccgatttgccaacggtgttcacactgcgaacgtaaaaataataatcatggcccggtttgatattgatactggcggctatccagtacagcgccgtaccaagataacgcgcgctggtttcaacctgcctgatatcggtaatccgcttttccgagaaccagaactcaaactgtaccgtcggatcataaacggcaagatgcggcgttgcggttatctgaaaatagcccggcgtcagctcaatcctcgacggcgctgccggtgcggcaatccggaacgataccgatgccggatcgccctgctgtccccaggcatttgccgcccggactgtcagcctgtagttacccagcgccagttgcgtgaagcggtatgtggtttccgtcgtccgggccgtgctgaccagccgctcactgccgtcatccgctgccacggtcaggcgaagcataaagctaacccccttcaccacctttggcgtgtcccatcgcgccagcacctgatattccccgctgtctgcggtgacttctgcggtcaggtgctgcaccgctggcggcgtgacaccattcaccgttccgctctggtcgccgtcaaagtgcgccccgttatccacaatggcttctttttccggtacatgctgcacggcagtgatggcatacgtaccgtcgtcgttctcacggatactcacacagcggaacaggcgctggcgcagcgtcggcagcttcagcccccacacgctgtattcagcaacgccgtcaggaacacggctcactttcaccttcacgccgtcggtgacggactggacctccacgctgaccggattgccatttccgtcaaccaggcttatcagcgtggtgccggaggatggcagcgtgatttcacggtcgagcgtcagcgtccgggtctggctgttcacagcaagcacgcgcccgccggtgctgatccccgcatagtcatcatcacagatttcaatgacatcgcccggcacatggcgaagcccttctgcgcccacgctgaagtccacggtctgcgtttccagcagttctgttttaatcagccacagcccggcgcggtgtgcctgcccccggctggtacagccaaaagcatccatcttcgtgacgttacgaccgtaacgggcaatggcctgcgtatcctccacaagctctgtcgccgtctcccagccgttgttcgggtcaatccagttcacctcaacggtattatggcggtctttcagggcgctgaagctgtagcggaacggcgcgccatcatccggcatcaccacattactgcggttataggtccacaccttatccgacggtcggtcctgcacgaacgtcagcgtctgcccgttccataccggcatacagcgcatcgccgagcagaaatcactgagcacatcccacgccttgcgctgtgtggtcaggtacgcattacaggtgatgcgcggctccgtgccgccaaagccgtccggcactgactggtcgcagtactggccgatgacatacagcgcccatttgtccacatccgccgcaccaagacgtttccccatgccgtagcgcgggtgggtcagcatatcccacagacaccaggccatgttgttgctgtatgccggtttaaacgttccgtcccagataccgctgtattgccgcgtctgcgggttataattcgacggcacctgcagaatacgcccgcgaagatgataattacggctcacctgctggctgccgaactgctccgagtccacctgcacgccgaccagtgccgtgttcgggtagcactgtttcacatcgataatttcggtgtatgacgaccagagcgttttgttctgcagctggtctgtggtgctgtccggcgtcatcctgcgcatccggatactgaacgggcgcggcggcaggttatccaccaccaccgaggccagatactgtgaagtggttttacccttaatggtgatgtctttttccgtcacccagccaccgttacgttgtatctgaaccagcaggcggacttccgatggattcctgtccccctttgaggtggtttccaccagtgcctgcacaccgaaggtaaaacgcagtcggtcaatgtttgccgacgtgatggtccgggtgatcggcgtgtcgtatttcacttccgtacccagcaccgtctcggagccggaggattcaaatccctccggcggagtctgctcctgctcaccagcccggaacaccaccgtgacaccggcgatgttggtattcccctcactgtccagcaccggcgtactgttcagcagtacgctttttaatccatccaccggaccttcaatcggcccttcactgatggcgtctatcacgctcagcatctgggatgatttcaggttgtccttcgcttcgcgcggggtatgccccttactgctgcctttacccattcctcacgctccataaacgacaaaaccgcccgcaggcggtttcacataaaatgttttgcatcagcgaccaatcaccacaacctgaccaccgtccccttcgtctgccgtgctgatttcctgagagaccacccgcgaccccacgcgcatttcaccgtacagaacgggcagaacattgccctgggcaaccatgttatccagtgaggagaaatacgtgttttgtttgccgttatccgttgtctgtgtacggggagttctggctttcggtgccagcatctgcgccacaccaccaagtaccatactggcaccgagagaaaacaggatgccggtcataccaccggccccaatggctgccccccatgctgcaagggtggctccggcggtaaagaatgatccggcaatggcgactgctcccaggacaatctggaatacgccccctgacttggccccggcgactctgggaacaatatgaatcacagcgccgtcaggcagagtctcatgtaactgcgccgttaacccggacgtgctgacgtcccgcccggcaatccgtacctgataccagccgtcgctcagtttctgacgaaacgccgggagctgtgtggccagtgcgcggatggcttcagcccccgttttcacacgaaggtcgatgcggcggccaaatcgttgcaaatccccgtaaaggcagatgcgtgccatgcccggtgacgccagagggagtgtgtgcgtcgctgccatttgtcggtatacctctctcgtttactcagttgttcaggaatatggtgcagcagctcgccgtcgccgcagtaaattgcggcgtgattcggcaccgatgaaccaaaacagcacagcagaacatcgcccggctgtgccgctgacaacggcacctgatacagccctgtggcctccagattatccagatagagattctgaccgtgacgccaccagtcatccccgcgatgaaaatccggcatctcaatccccgccagatgataagcatcccggaacagcgtgtaacagtccgtcaccccgtgctcaaagcgccgcccggtgagatgcggcacacagcggaacttgtgaatcgccccccggcagaccagccaccacggcaaatcactctgcacctgcagccgccggtcagcctcactcagccagggcagaccaccgggatgactgtggaccagtgccacaatctcaccctgcatctctgcctgcagccagtcctccggagccatccggaaataatcctccggctcaccggaaatattcacgcaggggaaatatctttccccctccggcgtgcttaccacgaagccgcacgactccgctggcgcacatcgccgggcgtgcgccagaatcgctgattctgtctctgtcatgggattactgcgaaagtttgttaatggaaaggaagccgccaaagttgccgacgttattgcggaacttacaaccgctcaggcatttgctgcatttatccttcgtgatatcggacgttggctggtcatattcatccgcgaccgccggaccgtgataaccgcactcatcgccgcgataggtccaggtgcaggtgttggccagcatgatacgtcccggaaaaacagcgccatctgtttccgtcggcgtggacagtacaaaggaggcactcaccgcgctcagttcgctgcactgctcgatgcgccagcggctgatcacctcctgctccggatcggcgtcactgtttccgttgacgaagttcaccgcatccagaaaacgggcgtaaaccttacgccggaccaccgttccgccgaccagactctgcagatcttccgccatcccggtgaccataccgtacaggttagaaaccgtcagcgtggggcgcgtactggtgcctttgccattcagttcaaaaccactcccctgaatgggatacggctgatactgtcgcccctgccaggtgaccggctcacctttttcgttctgctcattacagaaaaaataacgttctccaccgacctctgtcaggtcgatttcccagagcaccacgctggccgactgctccgcacgggtgcattcattcagtgtttcctgccggatatcctgcatcagttcaccacctgttcaaactctgcgctgaactcaacacgcagcatactgacccgcgacgaccattttgcgcaggtcacctttatctgcccccactcataaggcggcgtccacagaaaggctttccagcccccgtgctcttccagaaacgactccagtaccgtggcctcctcacgggggacagaaagcgtcacgctgtacgttttcaggttggcattcagcccggcaggcgctcgctgagaatagccatcaccaaagcgcacctttcttacagaaggggccgaagccacatccataccgggtttcactttccagcggaaggtcttcatcgtccacctccggagaacaggccaccatcacgcatctgtgtctgaatttcatcacgggcacccttgcgggccatgtcatacactgccttcatcatctgtggacctggcagaccattcgtaccgtcgttctgaatcaccacgtgattgttctgattaaaattaatgccttcagcccgccgcatctgcgccggacttccggcaccgcccacataaccaccttccgcatagccccgcatcaggcggtacaggttgccgacaccaatccagctggttgcctcctttgtgaagacaaattcaccacggtgaacaatccccgctggctcatatttgccgccggttcccgtaaatcctccggttgcaaaatggaatttcgccgcagcggcctgaatggctgtaccgcctgacgcggatgcgccgccaccaacagccccgccaatagcgctgccgatactcccgacaatccccaccattgcctgcttaagcagaatttctgtcatcatggacagcacggaacgggtgaagctgcgccagttctgctcactgccggtcagcatcgccgccatattctgtgcaataccatcaaaggtctgcgtggctgcactttttacctgcgacatactgtccgtggcgctctcttcccactcactccagcctgacctgaggcctgccatccagctcccgcgaagctggtcttcagccgcccaggtctttttctgctctgacatgacgttattcagcgccagaggattatcgccatactgttccttcaggcgctgttccgtggcttcccgcgctgcctgccggtcagtcagcccccggttttttgcatcaatggcggcccgttttgcccgttgttgctgtgcgaatttatccgcctgctgcgccagcgcgttcaggcgctcctgatacgtaaccttgtcgccaagtgcagccagctggcgtttgtactccatcgtctcatctttatgcgccagcagggatttctcctgtgcggacagctggcgacgttgtgccgcctcctccagtaccgcgaactgactttctgccttccacaaatcccggcgctgctggctgattttctcattcgctccggcatgcttctccagcatccggagttctgcctgaagcgtcagcagggcagcatgagcactgtcttcctgacgatcgcccgcagacaccttcacgccggactgtttcggctttttcagcgtcgcttcataatcctttttcgccgccgccatcagcgtgttgtaatccgcctgcaggattttcccgtctttcagtgccttattcagttcttcctgacgggcggtatatttctccagcggcgtctgcaggcgttcgtaagccttctgcgcctcttcggtatatttcagccgtgacgcttcggtatcgctctgctgctgcgcatttttgtcctgttgactctgctgctcagccttctttcgggcggcttcaagcgcaagacgggccttttcacgatcatcccagtaacgcgcccgcgcttcatcgttaacaaaataatcatccttgcgcagattccagatatcgtccgctttcttaaacgcggcctctgccttaatcagcatctcctgcgcggtatcaggacgaccaatatccagcaccgcatcccacatggatttgaatgcccgtgctgtcctgtctgcccaggtttccagcgtgcccatgttctctttcaggcggcgggtctggtcatcaaaccctttcgtcgcggcctcgttcgccgcctgcaatgccccggcttcatcgccggaacgctgcaactgagcaacatacgcaatctgctccgccgtcacgttatggaactggcgtgccatcgccgtcagccccgacgtcgggtctgtggtcagcttcccgaaggcttcagcgaccttgtccacctccacgccggatgcagaggagaaacgcgccacactctggctgatggacgcaatctgagcctcaccgcttactcccgccttaaccagtgcgctgagtgactcgctggtctggttaaacgtcagccctgccgcctgcccggctctggacaggaccagcatacgatctgccgtcagtcccgcctgattgccggaaaggaccagcgttttgttgaaatcggacagggttgagttaccctgataccaggcatacgccagcgcaccggtcgccaccgccagcgaggtggcccccaccatcggcagggtgatcgcaccggcaagccccctgaacatggggatcatcccgccgaaggagtccttaacctgaccaccctgttgcagcaggatcagccacggactttgcccgcctgcaagctgcgtggccacgtcggtgaactgtgcaggcagcatacgcatggcggctttatactgcccgacggaaatccccgctttctgtgcagccagcgcctgtcggctcagcgactgttcaacgactgccgctgtttttttcgcatcagtttccgtaccggaaaaatgacgcctgactctggccatctgctcgtcaaatctggccgcatccagacttaaatcaacgaccagatcgcctaccggttcagccataccggactcctcctgcgatcccttctgatactgtcatcagcattacgtcatcctccgtcatgtccgccacatccggggaagcggggataacttcattcccgtccgggccaaaacgaacgcctccggcaagccctgccgctttctgcatcagcacatcatcttcagtctcttcgtcagcctcgcgccggttcagcagactgaaatccagcggatgcatatccggatcgctgaaaaacaggctgagcacggtgtacgtcagcccggaaaagtgcatatccagcagaacatcatgaaaataatgggtactgtaaaagcggtgccagtcggcatactccgtggatgacatcccggcaagcatggcacgccagtcgggtcgccccatctcgcgcgccagtttcagggcaaaactcagctcaccgtcgaacactttcccgcagaaacaggctctgcaggcccggcatcctctgcctgttcaggggcatcattcaccacaaactcatacataccggacagccggtacaccacgttttcagcatgagaaattgcctctgtaggccaggtggtaagcacttcctgctcaatctgtttaacggcttcattcatagaaggcagctttgtcttctgcggatggttatgccacagggacatcgccaccacaaaagcgccggttctgatggcgtcttccacagtaaacttccggttgctgtctgactccgcctgttctgcctgtcgtttcatcagggcgagatgctcaatacgctgcagggctgacagttcagaaagcgtgacggtcacaccgttatgttcaaatgattcggttttcaggaacatcgctgactctccggattaactggcggtgacgttgatttctgcaaccgcagcaagttcaccattaccggatacgaccggaatgttgaccttgcctgcagcaacacctttcacggtgatggtcataccactgaccgacacggtggcttttgttttatccgcagacaccgcacggaagctcttgtcggttgcgccttccggctggaatgccacggtcagcgtcgtgctctgccctttcaccaccgaggtgctggcaggcgtcacggtcatgccggttgccgctgttaccgtgctgcgatcttctgccatcgacggacgtcctacgttggtgactttcaccgtgcgggtaatcacttccttcgccgtcaccgccttaccgatactgctgacccagccgcggaacacatcgaccgtgccgttcgggaagcggattttataggcacgggtatcaccttcattaaaccacgccagcagcgcctgctgcccctgctctccgggcatccacgccagcgtgaagctggtatctccggcagatttctgcccctgtccggtcgcggtccagtccgcatcttcatcatcgagataactgtcgtcataggactcagcggtcagttcgccgggcgtcaggtctttaacttttgccagacgcgaccagtcaacgtctgaaagcgggttcgcataagggtcaccgctccccttataaacccacagggtggtcccggcacctttcaccggcattacaggatttggtacaggcatagcgtcctcacatttcataggtaatgacataagtcagatcggctgaactccacaggcccgcatcatcgtcgcgccggtagtcatagccactggccaccatactggtgatcaaatctgacagtgcagggatatcgctcatcaccggataaatccgggactccatccacgcatccagctctgaatccggcacctgagcaggcaggaaaacttcaatatgcagctccgcctgccaggtatcgctgtccagctcttcgcccgtgtattcagcgccggtgagataaacggcaattgccggaaaatcttcctcatcaaaaacagcggggcgaccatcaaaaagcgtcgccccggtgtcatgcttctccagtgcatccagtacggctgcacggagttcagtatgtttcatcgctttattaccattctcagttgatgctgcagcgcatagcccagctctttcggaagacgttcacgccgtatccgttcaatattctgtttaaacgccgtggtcagcggcaccgccatcgggattttcaccacatcaatggggtaacggtttttcccggccacacgctgcatgacatgccaccggccatttttcagttgctgaataaacgcgccgggaatacgacggtttcccaccacaagcacactgccgccacctttcagggctgaacgctgcccctttttacgacgcctgcgtcgggacaggacaacccgcgcgttacccagctttattacgggcaaatccccccggttaaccctgattctggcctgcggatttttgaccgtggcccttttcagcctggccctttcctttaccagtttccggcgtacctttgtctcacgggcaacctgtgccaccgactgcgatatcgcggatgacgcaacgcggttaatggccattgcggcggcaccgggcaccgccgttctgctgatacggctgaggttttcaacggcctgctcaagaccttttatggccatacatccccctttcagcggcgacggttaacggcaggcggtacgccccgtccaagccagagatgacagcttccgccatcatccggcgaaatccgatctacccagaaattttcctcaccgatggtcagcgtgtctccacgccgcagctgccgcacatcatcagtccggacaaacagggacgggctggagccttcaacgcgcacgccctgtccggcatagctgatattttcagggtcatcaaaaacaccacgtatcacagcaccggactgctcaccggatgtcatggtggctgacgttcccatgtacccgcgtatcgtttcatcggcgcaggcaatggcagcatcgaacaggttatcgaaatcagccacagcgcctcccgttattgcattctggccaggccgcgcgctgtcatttcggctgccacaccggcagagacacggaacgccgttcccggcagcacaaatgccacagcctcatcccgcgtggcgtgaagtgcatcagtatgcagcgtcaccagtgccacaaccgtgaccagttcagccgtatcctgaatcacggtatccggctgcgctgataccacctcattttcatgcccggtcagcacattttcccggctgagaggggtgtcctgaccggcagtttcatccgtgtcatcaagctcttcttccagctctgccacacgaagcgccagttcttctttcgttcccgtcaggctgacatcgcggttcagttgctcacccagctcctgaagacgggcaatcagttcatctttcgtcatgaactcctccacagagagaaaatggccccgaagggccatgattacgccagttgaacggacacgaactcatcagggtcagccagcagcatcagcggtgctgactgaatcatggtgaactcacgcgccggatcgccggtggtcacccagtttttcgggtaacgggcagaggcgttaatgccttcgcgctgtgcgtccgcatcctgaatgcagccataggtgcgcagaccgcgagcctgagtgttccccagcaccatcgtgttgtccggcaggaagttctttttgacgccgttttccacgtactgtccggaatacacgacgatggccacatcgccatacattcccttataggacaccgctttgcccaggtctttcaccgctgtctccagctcggaatgagagccgcgacgggtatccagcttctccctgacggctttgaaggaacggaacagcgcccagcctttcgggtcaaacacgatgatattcaccacaccgctggcgttcagcgcgtaggcttcgatatcgtcggtcgggtcatacgtggacttgtcacgcttgctccactccgtgacgccggactgcgtgatgttgttcgccgcactgcggcccatatccacctcaaccggatcgaaggcttcaccggtcatggtgtatttgcccttgagcacggcagaaactgcctgcatctcttcgacctgagcaatggccagctcttcgtcacgcatgttctgcatgatgatgcgacggcggcggtaagccgggtccgccagattctgcggatcttcatccggcaggcgacgcagggtcatctgcggattcacctcatgcttgggtttgacatatcccggcgtaaattcagaggtggagccgccacgggaacggataacctcaccggaaacaatcggcgaaacgtacagcgccatgtttaccagtcccggaatttgtgagagatagactttctccgtagtgaagggatagctctcacggaaaaagagacgcagaaacagcggatcaaacttaaatttctgctcatttgccgccagcagctgggcggttgtgtacatcgacataaaaaaatcccgtaaaaaaagccgcacaggcggcctttagtgatgaagggtaaagttaaacgatgctgattgccgttccggcaaacgcggtccgttttttcgtctcgtcgctggcagcctccggccagagcacatcctcataacggaacgtgccggacttgtagaacgtcagtgtggtgctggtctggtcagcagcaaccgcaagaatgccaacggcagcaccgtcggtggtgccatcccacgcaaccagcttacgggtggatgtgtccagcatcagcggggtcattgcaggcgctttcgcactcaatccgccgggcgcggttgcggtatgagccgggtcactgttgcccagcggctggtaatgggtaaaggtttctttgctcgtcataaacatcccttacactggtgtgttcagcaaatcgttaacggcatcagatgccgggttacctgcagccagcggtgccggtgccccctgcatcagacgatccagcgcagtgtcactgcgcgcctgtgcactctgtggtgctgcggccagaatgcggcgggccgtttccacggtcataccgggggtttctgccagcacgcgggcctgttcttcgcgtccgtgagcctcctcacagttgaggatccccataatgcggctgttttctgccgcaaccgcagcggtgatctgcgcgttcacgtccggctgcgccgcgctggcgttttcgccctccgtcgctggcaccacgtcagtaacgtcagcctgcgaagcagtggctgaaacagttgttgattgagtctctttggtcattcgccctcctgagagacgggatttacgcgcatccagtgcatcacgcataacggtgatcgcatcggtgctgttaacaagttcatcagccagtccggcatcaatggcctcctgaccgctgtacactgcagcctcggtatccagcacagcctgcacagacaggccggtatatgtcgacaccttctgcgcaaacatccggcgggttgcgtccatccgggactgcagtgtctcccggacgtcatccggaagatggctgtagggattgccatccaccttatggctgccgctgtaaatcagcgtgatttccacaccctgtttctccagggcagcaccgtaattactgtgagccatcatgacgccgatggagcctgtccgggcggtctgcgtgaccagacgccgggaggcggcactggcaagcagctgacctgcactgcagttcatgtcgttggccagcgcccataccggttttatgtcacgcacacgggcgatgatgtcagcgcagtcaaatgcccccgccaccattccgcctggcgtgtccatatcgagcagaatgccgtccaccatcgggtcgctggcagcctgttgcagacgggcgataatgccgttgtaaccggtcatccccgagtacggctgcagcgcccgcgtccggctgaccagcgtgcccgacaccggcagcacggcgatgccgttcatgacctgataactgcgggcctgtcgtggtccgtcatcatcaccggataatgccagcgtcgcgagtgcctcctgggcagtcaggctgtcgccggacaccgcatccgtcaggcggctgatcccaagctggcctgcaagcgcacaaaagaaaacccgcgcataggcgggttcaagcatcagcggctcattaaaggccatgctggcaatatgcgggagattacgcagctctgctgtcactcttctcctcctctgttgattgtcgcagcccggattcaaatgccgcagccgcccaggcgggtggtttaagaccggctgcacgacgctccatcgtttcacggacctgctgggcaaaaatttcctgatagtcatcgccgcgttttgcacactctttctcgtaggtactcagcccggcttctatcagcatcaccgcttcctgaacttctttcagaccatcgatggccatacgaccggagcctatccagtcgcagttcccccaggcactgcgggcttcctgaaaactgaagcgcgcttttgaaggtaacgtcaccacgcggcgggcgatggcctcttccagccagcacagaaacatctggctcgcctgacgggatgcgacgaattttcgccgccccataaagtgcgcccacgactcgttcgcgctggcccgtgccgtggagtagctcatctgggcgtaattccgggaaagctgctcatacgagacacccagtccggcagcgatataccgcagcagtgactgctcaaacacggagtagccgttatccgtgtcctgagccgtctgcaggttcagtgagtcccccggcatcaggtgcggcacttttgcgcctcccagacggaccggtgctgcggcgtaatacgcggcaatttcaccaatccagccggtcagcttgtcccgctgctccttactgttcgcgcccagaataaaatccatcgctgactgcgtatccagctcactctcaatggtggcggcatacatcgccttcacaatggcgctctgcagctgcgtgttctgcagcgtgtcgagcatcttcatctgctccatcacgctgtaaaacacatttgcaccgcgggtctgcccgtcctccacgggttcaaaaacgtgaatgaacgaggcgcgcccgccgggtaactcacggggtatccatgtccatttctgcggcatccagccaggatagccgtcctcgctgacgtaatatcccagcgccgcaccgctgtcattaatctgcacaccggcacggcagttccggctgtcgccggtattgttcgggttgctgatgcgcttcgggctgaccatccggaactgtgtccggaacagtcgcgagggactggtatcccaggtggcctgaacgaacagttcaccgttaaaggcatgcatggccacaccttcccgaatcatcatggtgaacgtgcgttttcgctcaacgtcaatgcagcaacagtcgtcctcggcaaactctttccatgccgcttcaacctcgcgggaaaaggcacgggcttcttcctccccgatgcccagatagcgccagcttgggcgatgactgagccggaaaaaagacccgacgatatgatcctgatgcagctggatggcgttggcagcatagccgttattgcgtaccagatcgtccgcgcgggcattgccacgggtaaagttgggcagcagggctgcatccacactttcacccggtggattccacgcccgcaactgcccaccaaatccgctgccaccgccgtgataaccggcatattcacgcagtgatgtcatgccgtccggccccagaagggtgggaatggtggacgttttcatacataaaatcctgcaggtcccctgcgtcgctgtgtcatgccggtctgcacttccagctcagcaatgtattttttcaggtcagacacggaagtggtcgtaaactccactcgccgtccgtctttctgtaccgttgccacccgttttcctgtcatcaggtcatgcagtgccgcacgggcagcggcaagttcttcctgtcgcgtcattcatcctctccggataaggcacgggcgtaatctgccagtgttttcttgttggttgttgcactatcctcttcctgcaggctcgccagcagggcactgagatccagctgccagcgggaaatactgatgcgcagcgccgccagcgcataaacgaagcagtcgagcgcctcattgcgtcgctttttgctgtcccacagtatttttttcctgccatccacccatttttcgacctgctcttcagcagtcagttgctgcgcttcggtaagatcaaaaatatccgggttattcgggaagtgaacggcaccgggaagcggttcatccccttccggcgtcagtgtgaagcggttataaatctgctctttcgcggtatccgtaccaatttcggtaaggtaaaccccgtttttgtttcgcttacgtggcatgctggccaccggctttccgtagacggatgcccctttaatggggatcacccggaacagcccatgttttttcgagcgttcatacacaatggtcgggtcaatcccgccagtatcccagcagatacgggataccgacatttctgcaccattccggcgggtataggttttattgatggcctcatccacacgcagcagcgtctgttcatcgtcgtggcggcccataataatctgccggtcaatcagccagctttcctcacccggcccccatccccatacgcgcatttcgtagcggtccagctgggagtcgataccggcggtcaggtaagccacacgatcaggaacgggcgctgaataatactctttccgctctgccatcacttcagcatccggacgttcgccgattttcgcttcccacgtctcaccgagcgtggtgttcacgaaggttttacgttttcccgtatcccctttcgtcttcatccagtctttgacaatctgcacccaggtggtgaacgggctgtacgccgtccagatgtgaaaggtcacactgtcaggcggttcaatctcttcaccggatgacgaaaaccagagaatgccatcacgggtccagatcccggtcttttcgcagatataacgggcatcagtaaagtccagctcctgctgacggatgacgcaggcattatgctcacagagataaaacacgctggagggatcatccggcatccatttgaggccaaacggcgtctctttgtcgccaaatttaaggtactgctccttcccgcagtgcgggcaggcaacatgaaaacgcataaaatgcggggattcactggctgcacgctcaatctggcaggtgcctctcactttgggcgtggagccacggatggactttggccagacagagccttcaatacgcttatcgcccaggaacgtcggagagccttcctgttcaatatcctcatcaaaggcagcaagttcatcataacccgccacatccactgacttttcacggtagttttttgccgctttaccgcccaggcaccagaagccacgcccattggtgaaacgcttcatggtgagcgtgttatcccggtgctttttgccataccacggggccagcgccagcagcgacggaatatcacgaatagtcggctcaacgtgggttttcataaagttctcggcatcaccatccgtcggcaaccagataagggtgttgcgctgcttatgctctatgaagtaggcataaacacccagcagcattttggaataaccgacacgggcagacttcaccacattcacctcacggatgtagtcgctgcccatcgcattcatgatggcccgctgaaagggcagtgtttcccagcgcccttcctggtatgcggattctttcgggagatagtaattggcatccgcccattcaacggcggtctgtggctccggcctgaacagtgagcgaagcccggcgcggacaaaatgccgcagcctgttaacctgactgttcgatatattcactcagcaaccccggtatcagttcatccagcgcggctgctttgttcatggctttgatgatatcccgtttcaggaaatcaacatgtcggttttccagttccggaaaacgccgctgcaccgacagggggatcccgtcgagaatactggcaatttcacctgcgatccgcgacagcacgaaagtacagaatgcggtttccaccacttcagcggagtctctggcattcttcagttcctgtgcgtcggcctgcgcacgcgtaagtcgatggcgttcgtactcaatagtccctggctggagatctgcctcgctggcctgccgcagttcttcaacctcccggcgcagcttttcgttctcaatttcagcatccctttcggcataccattttataacggcggcagagtcataaagcacctcattacccttgccaccgcctcgcagaacgggcattccctgttcctgccagttctgaatggtacggatactcgcaccgaaaatgtcagccagctgctttttgttgacttccattgttcattccacggacaaaaacagagaaaggaaacgacagaggccaaaaagctcgttttcagcacctgtcgtttcctttcttttcagggggtattttaaataaaaacattaagttacgacgaagaagaacggaaatgccttaaaccggaaaattttcataaatagcgaaaacccgcgaggtcgccgccccgtaacctgtcggatcaccggaaaggacccgtaaagtgataatgattatcatctacatatcacaacgtgcgtggaggccatcaaaccacgtcaaataatcaattatgacgcaggtatcgtattaattgatctgcatcaacttaacgtaaaaacaacttcagacaatacaaatcagcgacactgaatacggggcaacctcatgtcaacgaagaacagaacccgcagaacaacaacccgcaacatccgctttcctaaccaaatgattgaacaaattaacatcgctcttgagcaaaaagggtccgggaatttctcagcctgggtcattgaagcctgccgccggagactgtgctcagaaaaaagagtttcttctgaagcaaacaaagaaaagagtgacattactgaattgctcagaaaacaggtcagaccagattgaagcaatttagataatcgtgcagactacgccccctcatatcacatggaaggtttatctatggatcaggtagtcatttttaaacaaatatttgataaagttcgaaacgatttaaactatcaatggttttattctgagctaaaacgtcacaatgtctcacattacatttactatttagccacagagaatgttcatattgtattaaaaaatgataatacagtgttattaaagggcctaaaaaacattgtgtctgtcaaattttcaaaggataggcatcttatagaaacgacctctaataagctgaaatccagagagatcacatttcaggaatacagaagaaaccttgctaaagcaggagtttttcggtgggttacaaatatccacgaacaaaaaagatattactatacctttgataattcattactatttactgaaagcatccagaaaactacacagatcttaccacgctaaaccataacgtccggcttctctcactcctgagccggactgcattggtttaataaaaaccatcaacaattgtgatttagatattcggaaccattcaaatataacaaaaccccgtaaaaacgaggtttatggataaattttattattgaatacatcagattaaattaatcttgacatcatagctttcaagacccgtcattttttcccgtgcggtaaactgaatactggtaacttctttcccggtctttttcttaagttcaataattttttttgttatatattcagaaatatctgcttctgcttttgtttttaagttttcaatattcatcatttcctcttttagtctgttatgactttccagttacacagtaagtcgattatatggtgcaaacgtgtaaaagataagatgaaacatcgcaataatcaacatacgatagtctaaattttacacaaacagacaaagagaattttcctgaattatcaatacaatagcatcaaatcaactcaagagccttattgctgcttccagaatttcttctgaagtaacatgtcgatccgcggctacataaatgactttatgatctccggtcagagatggaaaccctgcggccattacagtaaggtgtgttttttcgccatttggatattcacgcatgatggtgttaactccagtcatcgctggcactaccactgctggttcagagttaaaaaaaactatgatttttttcatgatgttaccgtagtatgtgagtatccatcgaatagataccaagcaaaaaagctcccgaaggagccttcattttcacttttttaaatccaacgacagacggctggcatttaagtattgtgaaatattatcaaatgtaatcatcattgatttacaaaagatacattttgccccgaaaggattcatgtcagaaacatcaaaagatgatgttctatactgggaaccatgacaacacgggcatctaaagtgaatatggtttgtaatattgtctacctcaaagcgccactacatgaacagcggcaggacctttaggtccgttctcaataccaaattcaacttcctgattctcagttaatgttttgaaatcgttgctctgaattgctgagaaatggacaaacacatctttgctgccatctttcggcgtgatgaaaccaaaacctttttcagggttaaaccatttcactaaaccagtcattttgttagacataattattaccttttgaagaaattagcccttgggcagaatggtccgaaaaaaaatatcagagagaaaaaccaacaaggaaatctcaagaggtacaaataataaaattataacaatgactgcttcagataaatttgtaacaaaccagaacaccattaacgcatgattaaccacccatagcaaggattacttttgtaaagaaaaacacagcaatgaaagaatagctttatttattaataataacgtgtcattctgattaagaccttttatcttacccttaagatttcaggaattttggctcatggaagagtcctttttatttaaattttacattccgcgatgtaaatgttccgatttaatattaccctacatttgatgctttttatctcttaaagattcatagatctgttgacaagtcactcctgcgatgtagcgttcgtcagcaatttcagcataaagctgagcttctgctgcaatatctccgagcatgttggtgagcattccttcggcggttttggttgttttgcctctgacggcagcggcaagatctgcggtatgcttcgctgcgtcaaggcgtatggcatatttttttgcttcggcaagcaactggttaacactatcagacagataagcagccctggcagaaatttcagcagatttctgttgtgcatctttaacagcctcatcacgggctatagttcgcccctgttcaattattcgagcagcaaattgagcatttacctcttgtgataatgcggcagcatcacgttccgcccattttttttgccatcctctgtcgctccagacatttccgacgataaatcctgacaacacgagaaaaatcaccatgaatatctgattcactgttctatcccccagcaggttaatgcgctctcctggtcacgacgaataacctgaccgtaacagttatttgaacgaatgcggcaatcgcgtccgccatccttaatccaccagcgaatcgcttcgcatgcacctttacgatcaccagcattcagccgcttataaaacgtcgacgggaaacacttaccggggccaatgttatagggacaaaatgacgcgatacccgctttttgtggttcggtcagtggtactttaatattgcgctccacccatgccagcgccttatcacgctcaatggcgttgacctggtcgcatttttccttcgacagtttcatattgggaaaaacggtttttccatccaccactgtggcaccccgacagatggtccatatgccagaaccatcgcggtatgccattgtgtggttaccttctttttcgtccagaaactggtcaagtatctgaggagcagatgcgccagcaccaatcagcgccagaacggcagccgacaggccgtatctgatttttgtgttcatatatatttatgatgaggacgctcgtgcttattggcaggattttcaatcttaaaggagtactgatgctgcagataagactcaactttttctgacaatttttctgctacttccaggaagacttgccggacgctccttctggctgctgcctcataaaactccagcgcagctccttcaacacggtccatggcgacatccaggtcaaaaatttcaccgtcaaagcgttctttgtcctgtaaggctacagttaccgtaactttattctcaaaattacggactcctttcacaaccagttcatagtcttgagtcattggattactctcctctcgcagccttacgcctgtcttctttaatcttgaaataaagatttgtcagatacgtcagcaggccaaaaaccaggctacccagcacaccgattgcagcccactgtgacggagttactttatcgagtaactgcaatgcccagaaaccagcattacccgccgatgtgccataggcaacacctgttgttaacttatccattgatttcatatcctcaccccgatgtacacggatggtgcaatatgtttgaaaagatcggagtctacggggtagttttgacagcacacgctgttctcaacggcgctaaagaaacatacacattaaaaatgtgagtaattattttgaaagaaagtcatatataaaataataatacgagaaatgttttcatatttagtgtactgtatacggccatttatacaggaaaagcctatgtcagaacgtaaagactcaaaatcacgccgtaattatctcgttaaatgttcctgcccaaactgcacccaagagtcagaacacagtttttcaagagtacaaaaaggtgcccttttgatctgccctcattgcaacaaagtattccagacaaatcttaaagctgtagcctgattgattttattagtaacaagtattttttatattttaataatatatttaaagcagataataaaaaacccgcctgagcgggtttgagattgtggtgctttttgtgggagtcatccacttacgcactttgttttgccatgccagcagttagcttctgctgtaaaactattcatgcagcaaacctgcacttcaccacaatggttagcatacttttcctgattaagattttgccaaatatgctggccattgtttcatgtattggacctccttaatttttattaaagaaatccaatattcactactctgtccgtatctctactcaggcatcagccttcttcgttatcgtatacagacgagcgatgaattttaatcagtaatgatgacatttgctgctgcaggacctttagcaccactctctatagagaaggtaaccttttgaccttcaaataaggttcgataattatcattctgaatcgcagaaaaatgcacaaacacatctttactaccatcaacaggagaaataaagccgaaacctttatcagcgttaaaccattttactaaaccagtcattttatttgacattctacattccttaacttgagcctttcggcataaatggtttgcataacagaaacgacttcgtacttaattggagagactcaaagaaggaataagtgaataacacctgaaatgagaactgctttagtaaactacttcgtatatcgtctgttcttcaaaccgacgcaatcattaacgcatagttgaacatatgaagcaatgtttattttagacatccagccatcttcaaccccatcaaaaaactatagctttcttcaggaacgtgtgtatagtgcgccaagttatcagtattaaggaatttttttgtcccgtaaaatgacaggaattgtcaaaacctttgacggcaaaagcggcaagggtcttatcaccccatccgatggtcgtatcgatgtccagcttcatgtttcagcgctcaatctccgcgatgcagaagaaattaccaccggattacgcgtggaattttgccggataaatggtctgcgtggcccttcagctgccaatgtttacctttcatgagctatattaaagctttaatttcaggccccatcggatcacacatggagagtttttatgaataaccccgtctgtcttgatgactggttgattggctttaaaagcttatgctgtactttggccgtaatagctctgctaataatataataagcagactcattgtgtttagggacattgtactggaagaaaacattttaaacatcaggcaaataaccaagtcaccagctaaataataagttaacagacatgagtcccgggatgagattcaacattaccattgccccatttaaagcacaaaacccgctcatcagcgggttttctactttttcttaacgtcgggtatacaaagcccatcgttgaaaaaattttatccatattttttgaaaaatgcaaacatcatgtcgccatcttcagcaaaaatcatttatctcgtcaccttcctcaattgcgcttccgcgtatgcttcttcctgccagcactttgttaccagtttaccaatgacgtccgcataccccttataccactgataatcggtcaggtctggtaccagcttctggacatgacgtcgtgccagcgtggtcggtaaacgactaaaccggtttccattacaacgcccacaaatcttatataccggtacgccatgaaaccgggttctttttttatccagaacaatccctttacccttacaccctctgcacgctgtgctggcttcgcccttaccatggcaatgctgacatagttccttcacccattcttccttgattacagattccccgcgtctgtagtgtttcaccacttcgcgcaatacattataaaatcccgtacctgaacaatgctcacagcgagccttacttgccgcagacctggagtaatcagcaaaggcaaaactcacgaggtaaggaataatctgtaaccggatttcttcactcaatttgttcaatgtcgggttatccagtgccatcgcgtaatttagcaggccttcaatcgcaaactgagggtcctgaacaccaacttttgccagaaataaggccaacccaagtggtgctttcgactgcaccatcccctgcgctgccattacatccgtaattgttaaacaaccggtgcctgtcgctggagcgtcatcgctcaattttggagattttggggagtaatattttggtaaggcttcaaggttcatgctcgttctccacttacgccagtacgccaattgccagcgcgcgatcgataaaacgaaatatcagctccagttgggagccatacttctcttcaaatgccactgtatccgtatgcagctcgttgtgatgctttctgcacaaaggcaacacaaagagatcatgtgcttttgttcccattccgccctgcccgtgaccaatcagatgatgcggatcgtcggctggcataccgcagcaagcacacggctgtgtcttaacccaacgtgtgtatttctccttaacccagcggcgacgtttaggcagcttcatgaaagattccggagactctggatcaacggtgatgcttaccaccgtcttttcctgtggtgatttttgttgctggtgggcgtaaggcaacggtgcaagattttttgtgcgttgtttcaatatgctggtggcggtctgctctcccggtacgatgtcgctttcgcggtacaccgagcagattttttccgctggtaatcccagcgaacgacgcgatacagcctcaggtagtgcatccaccacctgattgcagaccgcccaccaggataattcagccaaagataattcccgctcctgcgtaccgcttattgcgtgacggatgacgtcaatcacccatgctgtcagattttgttgagcaagcagctccagtgattccgatgtctggtcacgcagttggttgtcgcagtgccagcacaacaccattgcgccggtaccataacggtgaatgactgtttcagtgtgatggtaatcgccattaggccactggcaggatgtaacatgacgtaatagccagtcggacaatgcgccaacgccgccagcagcacgaatcacccgttcgttactaaaaaacggcagcaatgttttgtcttccgccagcggctggcgaacggcaggaacgactccggatggcagattacgcatgctttttggttccggttccaccagcactcgaggattatgaaatatctgtatggattcacggcccggcttaaggaccaccagcccaagctcaggcaccagaacaggtctaagtaatacccgcacgttacctccagatccgttgctggaaagtgcgggacgcacgtggtgggcgttcggaataaggcagcctgacagagattatccagtgccgatagtcgagactgagagctttcttaacctcgaacccgcgcctgcggtaagaatgaatcagccattcggcctgttctgcagtgcatggagggtgctggaaccattcagacttgaatgcgtgagaataccgcccgtgcgtgcaggcaagaacgggcgaattatcagaattgtaatattttgcgttgcgtgccatcggttttctccggtggcacggtgttactcagcgggagttcagccccgcgcaagattgtagatgagtttattctcctgaaaaagcagaaaagccagcttttattccgatctctttcaatgcctgtaatgaagtgacaaactcaccttcgcgcaagataaatccgtccgtgacccgagcatccacaaaattaattaacgcagccccattctttcgcaaacacataatgcggtaatgactaacaagatttccattttcaacgcacacagcatagaggccatcttcacaaaaaattttacgcagttcttcgatgttcatcatcagaatccttccggataattagctctcccctttaagggaccatccctcttatccctgcgcgctacttaagtatttttgattctattccggcaccgtccagaacttcaaacgcgttgaaaataaaaacaaaaacccgccgaagcgggttaagtgcgggtgcgttgaggatgcctgccacatcagaggtggcgagggatttctcccccgccgggtctcttactcctcaggttcgtaagctgtgaagacagcgacctccgtctggccggttcggattcgtacctcgcagaggtctttcctcgttaccagtgccgtcactatgacggttaaacagatgacgatcagggcgattaacatcgccttttgctgcttcatagcctgcttctcctgtcaacgcaaagcagaagtgtcaccttcggtgcgaaacagagatgtcatgctttggttcagagaatgcgtttgaccgcctcgctatatacttccgagcgttctcttttcccaacagaaatcacgaaaacgacaactttctcgtctataacctggtatacaaggcgatagcctgaagaccggagcttaatcttgtaacaatcaggcataccacggagcttgtttgcttcaatccggggtgactcaagtacttcaaccagcttctttttcaactgttcacgtaccgtcgagcccagctttcgccattcctttagtgcccgctcgtcaaaatccagaaaatacgccatcagagttcatccagcgtcacacgtactggcttaggattacgaagccgttctttcactatctccacaagttcagcatcttcatcactcaggagtgtctgtttgaacggcaagcgttcattgtcagcgatatactcgagcatgagacgaagcgcttcagaaggagttacacccattttttcaagcgcggcgtaagaacgcgctttaagttcatcgtcaatacgcaggttaatgctacccatgtcttacacctcttgtaattacaaatgtcattacaagtatcgcactacaacatgcttagggcaagtcacgaaggaagtcagaaagtagtcgtaagaacggtgatcactgtccgctttgtgccaggagcagccattgctaagtccatcctgtattgtgcaggtcagctcgtttttaaagagtccggccatcatcttactggtacagacaccatatactttgtgacggtcaggctacatatgcacaactcaacttattcatctattttttgctttagcatgtcagtgttgctttctcgtcggcgggtgagcggtgacctgacctgtcgataaaggaacgtaacacgttttatgcaacacccgcatgcggcagaaaattattgccgaacgtttacccctgtcaacaagctttactttctgaggcgcgccagcccgcgaggaaaacaatctgaacatcaaacaattaatgacacaagaaatacgattaaagatttttttgtgcatgccgatagtgcttttttaaaaggagaaatctatgtctgtcacaattcagggaaatacctcaaccgttatttcaaacaactccgccccggaaggaacatcagaaatagccaaaatcacaagacaaattcaggtgctgactgaaaagcttgggaaaatctcatcggaagaggggatgacgacacagcagaaaaaagaaatggctgcattggtacagaagcaaattgaaagcctctgggctcaactggagcagttgttaaggcagcaggcagagaaaaagaatgaagacgcgacagttcagcctgataaaaaagaagagaaaaaagacgatacaaataccgctggcaccattgatatttacgtctaagtgacagccgtattgtggccctcatcgggccacttttcgccatcagccttttctttaaagacatattatctttgtatcatttctgatagttaacattacaagatataagtaatggacgcactcccaattagtctatttaaatcgccacgagtttaactgacaacccatgatcaattatgaattgcaactatttctgtagtcacttttgtggggacagtccacaaaactgccaacttccgcttcttgctcttagcggacattagcataggctatttaccataacgcctcattacgcgcaccgcccagactgactcagcgcgtttctggcatatccccggtaaaacaagtaacaaaccacccgaaaatgaacaccagaaacgcgacttaagaatctaccctatgaatggatatgcactcaaccgaatcgatcttggtttcaatcttttttatcgggatcaggcttctttttaggtaacttcgggggcttaacttgctgatgactttgcgttcggcgcgtaagccagggatggtcagctttaggtttaacatagtattttgagcgtaaatcaatacgggcattatccactcgttcatggacactcttttcatcatccagtggtataggctccgggccatcaacatacttttcccagcccagcgctttcccgtcatacagaacgttaatttcaccgtcaaagttctcgcatacagtaacaaccgaatgcctaagtcgatatccccggccctcactgcgtacctgaaacgcactgcttttgtactggaaagtgagatttttagacagaacgcgcttcgcctgtaggctgaagatataacccagttcctcttcagaatggtgcacatcaagatgagcattatcagtagtacgaggcgacgtagcgaaccggttgttataggcttcaataaaggtcggcaaccatgcatttgctgtttcaatatcactgatattctgaagccgcatttctttgaccagcctgtcctgtagtgtctgattggcgcgctctacccgcccttttgcctgcgggctgttggcatggattggctcgatgcccagtgtctttatcgcacgagtgaactgggtcagctcaccttcccgctctgggttatttaccctgaatatactgtgtctatcagagtagagagcgagcggtacgccatgatcattaaggtaaccccggagggtttccatgtaagcccgggttgtttcagcaggcacaaaacgcaacgccatcaacgcactggtggcatcatcaatgaaaacgatcagtgtacatctggggcctcgattttcaaaccagtcatgaggtgagccatcaatctggatcagttcaccgtaagatggtcgtcgcatgcggcgttgatatatacgggcaattttacgacggcgttcacgccataacccctcttctatcatccactttctgagagtttcaacggataaagataaaccgtgtatctcgcgcaatttttcgcacgcaaacgtaggtccaaaatcagcgtaacggcctttgaggagtgaaattactgttgctctgaattcagtagaaaaggtattattaggacgctttccacgtcggtgggaaaccagaccagaaggcccttcatttctataccgttgcaccagacgtttaacctgccgaatagaaatgccaatgcgtgccgcagcttgttcctgaataatctgaagtcggtggagttccttatgactcatcgtaacagtctctttgatcatgaaaaatcccccagagaattgtctggggacattttagaatggttcaaaggggacattacagcttggtgttaacaatagcctgcttctccgtgcctttcggcacgtaagaggctaacctacatgtgtctagcatgaaattggcctcagattaatgttaagcgtcttgcaggacgcgtaatgttaactggggcttttctctatctgccgttggtgtccatgcccgaggcagatagcctcaagcacccgcagtcattctacttaactaagatttccccgcaaaccgtttttgtccagcacagtaaatatccaactaaaccaatggagttcgctgtatttaccgccagtattcaatgcacatgaccgccatgaacacccctaaaaaaagggcatttatatatccaaatattaatatcaaaacatcaactttttccatataccttgctgtgaagatgatgggcatacatgatgcgaacaaccagaacgcaacaaacaaaaactgcaatgcgtttttcattattcctcctacaatcaatgtgcaattacatttaaacacacctcaatttggccggacatataaatatctaaaccagaaaaaatcacttacatagcgttacaaactctttagtctaaaggttcatcgtaaaacattccccatacttatcagtccgttccgcgccaggtagctcattgccttatctggcaacctgtaatcaggtttccgctttttcagttggctggtcgtttaaccgacatagttaatccattaatctagttgccggatgttggtggattttcgcgttttagttgttcataaaagtgcacagctttaaccagttcttctgatgtaactgggactggtgaggcagtgaataaggcctgaatttgatagttcggcctgtcgttacaatcctcttttttcggtacatatttccagtcaccagaccactacttcccctgaaagtccgtaacgccttttttcacgtagcgatatcgccatgccactggttttgcttgccccgccgtttcatgcccttcctgataattaatctcgctcattcatcgccccactcatcacaatatgcttcgaccggagtttttcccgcttcatagtcatcacgctaggattcgacatcagcagcacttccaccgcgtaactcaccatagtccattaatagttcatcccgctcttcaaaactgatgttatatttagctgaacaaaaatcagccactttgttcttcctcatcgtcttttatttcgtggtatgagtaattgcagtagttaaagaaaatttcttatgctccgtcatgaatttcctcaggtgttgcgtcatcgtccacttcgaatacatcctcaaaatctccaccagctattcccgtttcaataataattttgaactttcgcatttcactaccgccctttcgggcggcctcctgatgttctgagggtgcagaaatccatccggttaaggattaaattttatttacagaactgaatttaattattcagatatacgtatctgtagccttacgaatctactcactggatgcctctttcataaaaataatccagtgggttttatcgttttttccctgttcgttgacagataacaggttttctgtctgtcagtgccagaatctggcttaccggtatttgcgtttcattccattaaaaaatcagaacgccgtgcggcctcaacacccgaaaggcttctttaaatctctgtcgcgaatcatcacgccaggcatctttattcagccgtccatatttctttcccatccaggcgttatcaccaacactctcaagatgcggagggtctaatacaaccatcgaaaaagatgcgtctgcaaatgataatgcacgaaaatctgcgataatgtcagggctgataatcaagcgtctcccattgcgtaatgtgtatccttcttttctgatatcgctgaatatcgcccgttcgtcagacttatcgaaccagaacatgcggctgccacagcacatatcaagaatggttgccggtgcactcactgcgccacgtcctgaaaattaccctgatagaaagccagtatgcgctgcataacttcgctcttccggcactcgcgacagattatgtttaggcgactgtcgtagcgacgtatttctccgtcaggtgatgaccagataaggtccggatcaaccacagcaggtttcttcacctttgccctcgagagttttttgcgggcgttttgccagtccttacgcgcctgttcagaggggaataacccgtagccggagttgtatacatcgccactggctaccagctctctggcaagaacgctcatcagatatctagtcgcacctgttttagcttccagttgccgtaacgtctcacggccgctctggcgcacgagttccaccacctgccatttaattttttcccgctcttcttgtgtaaaaacttttgccacaagtcccccttaaaattacctcatgacctgaaatcaacacttatcctctgaaaccaggcggaatttctgtatccggttcagaaatatgattaacacaacgctgtacaggtgaacgtcccaggcggatgaccagttcgtcccatttttcgcggagctttgacgggctcatgatgttttttacccagaatggatctcgctgaacccgaccaaacatttcgcaaatttgtctgtggcttctgccatccagcatccgcattgtgcgcacgtcattggcccaggcagtccagttaggctcttttggtcgcatgatctcgccatcatcactggctgcctgttcgtagagacccacgatccgcccccagatccactgcgcacacgccaaatcctccctgctaccccactggcgttttttcgcactaaacacaaccgcgtcggagttccgggttaaaaaatcctgttcagtcgtctgcgggtccggttgcgaagcttccggacgaaaagtgtttttattctctgtagtaatctctgttgtattctctgtaagatcatcaggccattttgacccgatgacattgggtcgttttgaaccaatggagcgtttcattttgacctcttccatcgtgtcattttgacctgatggagcggcgcattttgaaccgatggattcgctcaatttgccaccatctaaaagctcgctcccatagttgatcgtgtagaaattggtcatatcgcgctttgatttattgagcttttcacaacgcaaaagccccagcgttttcagacttgcaaacgcgcgctttaacgttgactctgaccagaatgggaactgttccagccattgttccgttgtgttataaatccagcgaacaccatcacattccatgccggagttggtatctctcaaccagtagtgcagttgttgcaaaacaatggcttcgtttaagccaattttcattgccagctgcgtgtttataaccagtgggcgttcagcaaaaagaaggctcataattccatccagctttttgttggtattgctgtcgatacgcaagtttgaaagcaattgctttttctataagttcgtcagtttcacgatccactacggcaggatcagcaaaaagcagtccggactccaccacatcgccatattctttgtttaacccggcgatcatgcacgtgatgctttttccgtcagtaatttcacgatacaacctgaaatcattaatccggatagcctccataattgcaggcactagcgccgtgaacttttcacgcttatccctggtgtcgatagccttccagcgttcaaatatcttcactcgattaacgccaagcgctcgctgatcaatcgcgccaccttcatatgtgacacgctgaacatcgatgttcgggcgctctttcaaagcccagaatgcttcagtgattaatatcgtcgcctgctcctgtgtcattcctggtcgacatatccaggcatccagagcctcacgagcctgttcaggagtgattttcattgttcaaccgccccgcccgcttcgtcttacgatattcatcataaactttgggatcatactgaagctccccgccagatgcctcctgtagacgcatcgcgcgaccttcgggaactaaatcccctttccagctataaagcgaagccaaacgaatacctgctgcttgtgcaagttttgtttttgaaccgaaatacaaaagagcgtcagttttaagcatttaaaacacctttattgttagtcataactaacaagatagatgttaacaaaaacatagtcaatacgatttagcattagctaactatggaaacaaaaaatttaactatcggcgaacgcatcaggtatcgtcggaaaaacctcaaacacacccaaaggtctcttgctaaagccctgaaaatctcccatgtgtctgtatcacaatgggaacggggtgatagtgaacctacagggaagaacctttttgccctcagcaaagtattgcaatgctcaccaacatggattctatttggcgatgaagacaagcaaccaacaccacctgttgagaagccagttgccttatcccccaaagaactagagctccttgagctgtttaatgcactgccagaatcagaacaggatacccagctcgccgaaatgcgagctcgagtaaaaaacttcaataaactctttgaagaattactaaaagcccgtcagcggacatataaaagataacatcatcaatgagttatcttttaccacatcaattatgttagctatagcatacaaaatcacttgaccgatatgttagtcatggctaatcttgtttgcatcaacacaccgcacggtgttctcagcaaacagttccgctaccccagcgttaaggggaaatgaggtcagcatggatactatcgatcttggcaacaacgaatctctggtgtacggcgtgtttccaaaccaggacggcacgttcaccgcaatgacgtataccaaaagcaaaacgtttaaaaccgaaaatggtgcccgtcgctggctggaaagaaactcaggtgagtgatatggatttcgacacaatcatggaaaaggcttacgaagaatacttcgaaggccttgccgaaggcgaagaagctctcagcttcagtgagtttaaacaggcgctttccagttcggcaaaatctaacggctgataagcgaaacagcaccgcgaggaatcagtatgcagaaacgagaacccgtcatcatcgcgccagactataccgatgatgaactttatgagtggatgcgccagaaaattaatgcagcgcaggatctgaaatgggctaatgaagccagggctaagcaggctgaaaatctgtccgctctggagcaggatatcaccaatctggaaaaagcagcggcattaagcattgccagaatgattacatacccgcgttagtagctaatcaacaaagctaaggttagtaattaaggagttctccacgggtgaggtggagtgcgtgcgccggacacgggtgcgcatccggaactgacagtttactgaaaggatatttccctgaaaagtcagaccataacgcgaaagcgcacggcgaggtagctggttcatagatagcctgtcgttaaattttcgtcgaccgtgcgcttccggttgtggcaacccgcgaaatggcgtatggcggggttattccttccccgttgaggacaccgggttgtcaggttgaccatacgcttaagtgacaaccccgctgcaacgccctctgttatcaatttttctggtgacgtttggcggtatcagttttactccgtgactgcctctgccgccctttttaaagtgaattttgtgatgtggtgaatgcggctgagcgcacgcggaacagttaaaaccaaaaacagtgttatgggtggattctctgtatccggcgttaattgttaactggttaacgtcacctggaggcaccaggcactgcatcacaaaattcattgttgaggacgcgataatgaaaacgttattaccaaacgttaatacgtctgaaggttgttttgaaattggtgtcactatcagtaacccagtatttactgaagatgccattaacaagagaaaacaagaacgggagctattaaataaaatatgcattgtttcaatgctggctcgtttacgtctgatgccaaaaggatgtgcacaatgaattcagcatttgtgcttgttctgacagtttttcttgtttccggagagccagttgatattgcagtcagtgttcacaggacaatgcaggagtgtatgactgcagcaaccgaacagaaaattcccggtaactgttacccggtcgataaagttattcaccaggataatatcgaaatcccggcaggtctttaaaacagttccgtaataaatatccggtttcattcttatatgccagcaatggcagggatttgttcatccttaaatctgtcatgaggttaaaacaaatgagtaaagtctttatttgcgccgctattcctgacgaactggcaacaagggaagaaggcgctgtggctgtagccacagccattgaagctggcgacgaacgccgtgctcgagcaaaatttcactggcaattcctggaacattatccggctgctcaggactgcgcttataaatttattgtctgcgaggataaacctggcataccctgccctgccctcgattcatgggatgctgaatatatgcaggaaaaccgctgggatgaggagtctgcttcttttgtcccggttgagactgaatccgatccgatgaacgtcacttttgacaagctggcccctgaagtacagaacgctgtcatggttaagttcgacacatgtgaaaacataaccgttgatatggttattagcgcacaggaattgttgcaggaagacatggcaacattcgacggacatatcgttgaagcgttgatgaaaatgccagaagttaacgccatgtatccggagcttaagttgcacgccattgggtgggttaagcataaatgtattcctggtgctaaatggcccgaaattcaggcagagatgcgcatctggaaaaaacgtcgcgaaggtgaacgcaaggaaaccggaaaatacacgtctgttgttgatctcgcccgcgccagagccaatcaacagaacactgaaaattcaacaggaaaaatcagcccggtcattgctgccactcatcgcgaatacaagcagacatggaaaacactggatgacgaactggcctacgctctctggcctgtgatgtggatgccggaaacattgacggcagcatccatcgctgggcaaaaaaagaagttatcgacaacgaccgcgaagactggaagcgtatctcggcatcaatgcgcaaacagcctgatgcccttcgctacgaccgccaaactatttttggccttgtccgtgagcgtccgatcgacattcacaaagatcccgtagcactgaacaaatatatctgcgaatacctgacgacaaagggcgtgtttgagaatgaagaaacagacctgggcactgttgatgttctccagtcatcagaaacacaaactgatgcagtggaaactgaggtatctgatatcccaaaaaatgaaaccgcgccggaagctgaaccatctgtagagcgtgaggggccgttctatttcctcttcgcagataaggacggagaaaaatacggtcgcgcaaacaaactctctggtctggataaggcactggctgctggcgccactgaaatcacaaaagaagaatattttgcccgaaaaaatggcacatacacgggcttaccgcaaaatgtagataccgctgaagattcagaacaaccagagccgataaaagttaccgctgacgaagtaaacaaaattatgcaggcagccaatatcagccagcctgacgccgataagttgcttgctgcatcacgtggtgaatttgttgaagggattagtgacccgaatgatccgaaatgggttaaggggctccagacccgcgattctgtgaaccagaaccagcatgaatcggaacggaactaccaaaaagcggaacaaaacagtccaaatgcgttacaaaacgagccagaaacgaaacagcctgaaccagtggcgcaacaggaagtggaaaaagcctgcaccgcctgcggtcagaccggcggcggcaactgccctgattgtggcgcggtgatgggcgacgcaacataccaagaaacattcgatgaagagtatcaggttgaagttcaggaagatgatccggaggaaatggaaggcgctgaacatccacacaaggagaacactggcggcaatcagcatcacaatagcgataatgaaactggcgagacggcagatcacccaattaaggtgaacggtcatcacgaaatcacatccaccagcaggacgtgtgaccatctaatgatcgaccttgaaaccatgggaaaaaatcccgatgccccgattatctcaataggcgcaatatttttcgatccacaaaccggagatatgggaccggaatttagcaagaccatcgatctggatactgctggcggagtcattgatcgtgacgtcattaaatggtggctaaagcaatcacgtgaagcgcagtctgccattatgaccgatgaaatcccgttagatgatgcactactgcaattgcgggaatttatcgacgaaaactccggtgaatttttgttcaggtctggggtaatggggccaacttcgacaacgtgattttacgccgttcatacgaacgacagggtatcccctgcccgtggcgctactgcaacgatcgcgatgtacgcacaatcgttgagctggggaaagccatagacttcgatgccagaactgctatcccattcgaaggtgagcgccataatgcacttgatgacgcccgttaccaggcaaaatacgtttcagttatctggcaaaaactgatcccgagtcaggctgattcttaatgttcaactgtcgccggttgtgactggtattctgcaaccggcgctcgtcttatgtaagagataaagaaatcgatgagcgaagtaatcatgattgtctctcccggcaaatgggtatccgaagagcagttaattgcgctgaaaggaataaaaaaaggtacgttaaaaaaggcccgggaaaaatcgtttatggaaggaagggaatataagcatgtcgctcatgacggcatgccatgggataacagtccatgcttttacaacctggaagaaattgatcgctggattgagcgccaggcatcagcgagaccaagacgtcatcttacttgactaaaagccacactaactaatgagagaagttgaaatgaaatatccgacaggcgtggaaaaccatggagggaaattacgtatctggtttgtttataaaggcgtaagagtcagggaaaatctgggggttcctgacacagcaaaaaacaggcgcgttgcaggtgaactacgctcctctgtttgttacgcaataaaaactggtgttttcgactatgcaaaacagtttccctcctcacgcaatctggaaaaatttggtgaggcccgacaagatttaaccataaaagaactggctgaaaaatttctggcactgaaagaaactgaagtcgccaaaacatcactcaacacataccgtgccgtcatcaaaaatatcctgagcataatcggtgaaaaaaatcttgcctcatcgattaataaagaaaaattactggaggttcgtaaagagctactgactggataccagatccccaaaagtaactatattgttacacaaccagggagatcggctgtaactgtaaataattacatgacaaatcttaacgccgtgttccagtttggtgttgataacggttacctggcagataatccgtttaaggggatctcgccattaaaggaatcaagaaccattccggaacctctttcgcgggaggaatttatccgtcttatcgatgcgtgcagaaatcagcaagcaaaaaatttatggtgtgtttctgtttatactggcgttcgccctggtgagctgtgtgcacttggatgggaggacatagatctgaaaaatggaacaatgatgatcaggagaaatttagcaaaagaccgtttcacggtaccaaaaacacaggcgggaaccaatcgggtcattcatcttattaagccagcaatcgacgctctccggagtcagatgacattaacgagactgagcaaagagcatatcattgatgttcacctcagagagtatggcagaacagaaaaacaaaaatgcacctttgtttttcaacctgaagtgtcagcgagagtaaaaaattatggtgaccattttaccgttgactcaataaggcagatgtgggacgcagcgataaaacgtgccggactccgccatcgaaaatcatatcagtcgagacatacttatgcctgctggtcgctgacagctggtgctaacccggcatttatagcaaaccagatgggccatgcagatgcgcaaatggtatttcaggtatacggaaaatggatgtctgaaaacaataatgcacaggtagctttgttaaatacacagttaagcgagtttgccccaaccatgccccataacgaagcaatgaaaaattaatttaatatttatcaaatagttgacacgcatgactcttgaaatccataaattcaagcgcagtgcccagccatcccgatactgctgctttcaccaaatccttagtgcttctttcgtgtttttctattgtcataatggttatctctaaaaaagaggtaagatgcgtactacttactcgccgttattggtattattcagaaaaagtgagtaagactttgcagcaatgtttttgatcctgttcaaataaactaatggcatcagcaacatgctggaaatcaaacgtatgggtaattaatttttctggtttaattaaccctttacttaaccagtcgataacgaccggaaatttatttgcatttaagcgtgaagaaaaaatagagagttcttttccggtaattccttgctgaatcacttcagacggttcactggagaagcccatcaatacaatacgtgccgctggagaagccagcgttacggcctctttcaggatagaaggatgacaagccgcatcgataattaatgtcggcttgatgcctttttcagtgaaaatctcgccaagcggtgtctggctgttattaatcgcccagtcagccccgctctctttcgctttttccagtcgttcatcaatgcgatcggcaacaatcacatttttaacgttatagacgccttttaatacctgaacgatcgtcaggccgattggaccggcaccataaaccagaacggtatcattttcagtcggttgaccatgaccggttacgttagccgcaatggtaaaaggttcgatcatcaccgcatattgatcggccactgcttcaggaattttccacgcattttttgccggaaccacggcatattcactgaaaccaccgtcagcgtgcacacctaatacagccagtgtcgtacaaacgttcggtttacctatagagcacggatagcaatgcccacagctgaccaccggatcgacagcaacacgttcaccgactctggcgctttccacgccgtcacccactgcatcaatgacgccaaagaattcatgaccaatgacgcgcggatatttcgcaaaaggattatgcccacgataaatatggctatctgaaccacaaattccggcaagtttcacttttactcgtacttcacccgctgacggggtgggtatttcacgttcgacaatcgccagttgattcggtttttcaattaatatgcttttcattatcttactccttaccagttccacagcgtgccatcttccagacgtgcgactggtagataagcaggttcatagggatatttcgccgccagcttttcatcgaattcgataccaagacccggtttgtctcccggatgcatatagccgttatcgaaagtccagttgtgcgggaagacttcgagcatttgttcggaataacccatgtattcctggacaccgaaattggggacccacagatcaaagtgcagcgccgcagccatgcagactggtgacaaatcggaaggaccgtgtgagccagtacgtacctgatacagcgaagcaaaatcggcaatccggcgcataccggtaattccgcctgcatgggtcagcgtggtgcggatataatcgatgagttgctcttcaatcagttgtttgcagtcccagatgctgttgaagacttcacccactgcgatgggtgtgacggtatgttggcgaatgagacggaagcattcctggttttccgcaggcgtcgggtcttccatccagaacatgcgataatcttcaatgcttttaccaaagcgcgccgcttcaataggcgttaagcgatggtgcatgtcatgcagcaaatgttcattaaaaccaaacttgttacgtaccgcgtcaaacaatttcggcatgaaatcgaggtatttctccgtcgaccacagctgctcttccggccactgtcctttggttgcgggttcataagccagacctttacctttcgacatgccgtaggtggttttcataccagggattccgcactgcacgcggatggctttgaatcccagctcctgatgacgggcataatcatccagagcttcatcaatactgtgaccggtggtatggcaataaaccatcaccccttcacgagacgcgccgccgagtaactggtaaagcggcatgttggcagctttggctttaatatcccacagcgccatatcaaccgctgaaatggccgacatcgtaaccggaccgcgacgccagtaagcacctttatagaaaaactgccagatatcttcgatacggtgcgcatcgcgaccaataagctgcggacaaaggtgatcctgcaaataagaggccacggaaagctcacgtccattgagggtggcatccccaaggcccgtaataccgtcctcagtggtgatttttaacgtgacgaaattacgccccggacaggtaacaaaaacttcagcctttacgatcttcatgttcgattccttgcatcgcttgtcgtgatgcatgaaatctacgcaactgaactactaccatacaagtatgaagatcgaaaaaagccggagtgatcacaaaaaaaggcgtatatttgcgctgtgaatggttgacaaaagatgaaatagaataccttttgtcagctgacacttcctcgtatcttattgataaaatggatttatgttcctacgtgcgcccccagcccgcaacaatgatcaacatgccgcaaagcgcaatcaacgcccccgtccagtcataaagacttagtttcacgccatccacaacgcgcagccacatcaacgccgtgcagacataaacgccaccataagccgcgtaaacacgcccactcgccgcaggatgcaacgttaacaaccaaacaaacagcgccagtgaaatccccgccggaagcaacagccagatactggcgtttcgttttaaccacaaccagggcagaaagcatccaataatttcacacagcgcagtagcaaaaaatagtaacgttgttttaatcatctttgtcacttattgacatcatgtatagttatagggcgacataatatcatcaatataaacaccctcctggtacgttttgcgttcgcagtggatggtgtagaatcacctttaatcattcatacagggaatgaattatgaaaatcactctcagcaaacgaatcggcctgctcgcttttctgctgtcttgcgcactggcattgagcacaactgttcatgccgaaactaacaaactggtgattgagtctggcgacagtgcacaaagccgccagcacgccgctatggaaaaagagcaatggaatgacacgcgcaatctgcgccagaaagtgaataaacgcactgaaaaagagtgggataaagccgacgccgcttttgataaccgagataaatgtgagcaaagcgccaacatcaatgcctactgggagccaaatactttgcgctgcctggaccgtcgaactggccgcgttattaccccctaacctgttattgatttaaggaatgtaaggacacgttatgccaagcgcccacagtgttaagctacgcccgctggagcgtgaagatttacgctatgtacatcaactcgacaataacgccagtgtgatgcgttactggtttgaggaaccctacgaagcctttgttgaactctctgatctgtatgataagcatattcacgatcagagcgaacggcgctttgtggtggaatgtgacggcgaaaaagccggtctggtggagctggtggaaattaaccatgtacatcgccgcgcagaatttcagataattatctccccggagtatcaggggaaaggtctggcaacccgtgccgccaaattagcaatggactatggcttcaccgttctcaatctctataagttgtatctgatcgtcgataaagagaatgaaaaagcgattcacatttaccgcaagcttggctttacggttgaaggtgaattgatgcatgagttttttattaatggtcaatatcgtaatgccattcgcatgtgtatattccagcatcagtatctggcagagcacaaaaaaccgggtcagactctcctgaagccgaccgcacaatagcattaataataatcgattgtatttttgatggtgtaaacccgttcgacggcgggttttactccttcatcaacaatgatcagctgacagtccaccggattggcgtgactgtcatattcacagctctgttttacattaccaactcgttgattattcagtaaagtaaccgctgtgtaatctaattttttgatcgggtccgttgatggcgtggcgctgacagataatgttttgtcgttacttttcgtggttttacccagtggataaccctgatcatcatagcgatattccatctgcatttgtttgctgctggctttaatcacgaagccattatcatcggtttcccaactcaccccggcagaaggtaattctgctagctggcattttccctgtaaacgtactctcttctccagcgtctcggcatcacggtaataattggcgtccagtaccagagcgaccacggtattattttccagatccagtaattcgagtgaatcaaaacagccttcttgcgacaaagtcccagaaacacgtttcgtcacttcaccttgctcatccattaatgtctgagtgaaatcttttaccggaccacgcagcggatcaaaatcgaattcattagagaaactggccatctcaggggtaaatgaaagtgttacctctgtgcggtcacatcctgtgaggaatatcgcgagtaagcatggtagtaatttgtatttcacaacagtcaccagagagtagagatgattctcaatcatagtagcaaatacagtactttacacgttaaatgctatgcttaaagaagttatcttcgcgtaaggagcttatgatgaaactctcaacctgctgtgccgcgcttctgctcgccctcgcctcacccgcagtactcgccgcgccgggatcctgtgagcgcatacagagcgatatatcacagcgcattatcaataatggcgtacccgaaagcagcttcacattaagtattgtacccaatgaccaggttgatcagcctgattcccaggtcgtcgggcattgtgctaatgatacgcataaaattctctacacccgcaccaccagcggtaacgtctctgctcccgcgcagtctacccaggatggcgcgcctgccgaaccgcagtaatacattatcgactgaacgccggatacgacacatccggcgatttgaacatacaacataatcccaccttattactcatacccttctattgatatggattaataattcttaacccaaaatgggtagaccccctctattgttagcgcgctaaatattcaatatataaacttttatataacgataaagaacagggagtgagttatgtccaaaaatgaacgaatggtgggcatcagccgcagaacactcgttaaatctaccgcgataggttctctggcgctggctgcaggcggtttttctttgccgtttaccctgcgcagtgcagcagcagcggtacaacaggcccgcgaaaaagtggtctggggtgcctgttccgtcaactgtggtagccgctgtgcacttcgtctacatgttaaagataatgaagtgacctgggtggaaactgacaataccggcagcgatgagtacggcaaccatcaggtacgcgcctgtttgcgcggtcgctccatccgccggcgtattaatcatcccgatcgcttgaattacccaatgaaacgcgtgggtaaacgcggtgaaggcaaattcgaacggattagctgggatgaagccctggatactatcgccagtagcctgaaaaaaaccgtcgaacaatatggcaatgaggctgtatatattcagtactcttcggggattgttggcggcaatatgacccgctcttcgccatcagcctcggcggtcaaacgcctgatgaactgctacggcggttcactcaatcagtatggctcctacagcaccgcgcaaatttcctgtgccatgccctacacctacggcagtaatgatggcaacagcaccacggatattgaaaacagcaagctggtcgtgatgtttggtaacaacccggcagaaacccgcatgagcggcggtggcatcacttatcttcttgaaaaagcgcgcgagaaatcgaacgccaaaatgattgttatcgatccgcgatataccgatacggctgctggtcgtgaagatgaatggcttcctattcgcccgggcaccgatgccgcgctggttgcggggattgcctgggtattgattaacgaaaatctcgttgatcaaccttttctcgataaatactgcgtcggctatgacgaaaaaaccttacccgcagatgcaccaaaaaatggtcactataaagcctatattcttggtgaaggtgacgataaaacagcgaaaacgccgcagtgggcttcgcaaattaccggtatcccggtagaccgtatcatcaaactggcgcgtgaaattggcacagcaaaacccgcttatatctgccagggctgggggccgcaacgccaggcaaacggcgagctgactgcacgcgctattgctatgttgcctattttgacgggcaatgtcggcatcagcggcggaaatagtggcgcgcgtgagtcgacctataccattaccatagagcgcctgccggtgctggataatccggtcaaaacgtcaatctcctgcttcagctggacagatgctatcgatcatggtccgcaaatgacggcaatccgcgacggcgtccgcggcaaagataaactggatgtgcccattaagttcatctggaacttcaaggacttgaagcggacccttagtaggcctgaggtcctgcattgagtcaaggactttgtgtcaggctttgtgtcagccttgtgtcattagacgggatgtctagacggctggtcaggaccccggtggcctcggtctggacttgaggcggggctatgggggaagtctgctggcttaatgtattagatggtcattcacatttttctgtcagaaaccatcggtcccactgtgagtccaaacctaagcccccagaagcccacccacagccttagacagagtgtcgaatacattcacaccgagtcgaccggagaggaccatatagagacccacagagaggaacacgagtttatagaccagagtcaggagggaccttaggtctgcggaagtcatggacataaagcctccttcgtctattgtactactgcactagataactagtacaaaacaaaggtccagaccattggtccagaccatagttatcatgatgattggaacgattgaacggtaggcactttacgtctcacccactgttcagcttcagccagtgaccagcatagccgcttatagactctgcgtgtcatccagattgttgcttgatatcgtccaccctccacaggctgtatagatgtcttaatcacagtgacaggccaccacctgaagtcctgctgatattcagtccagacttacctctgctcatggtcttacctccctcggtctcctgaccttgggtatcgactacagcttgctgagcgtcatctggaggagctacaggaggagctacaggaggcgggaccgaagccccaccttgagtcccaccaccacctgtcaggcccttggcgatggacctgaagcctttactaatgctcttacccattggtcttacgcttcggtcttggtgaacttcaggcgtttgactacaggcaggacggcagtagctgagccagtgcccatcttgatggtcgtagcagcttcagcgacaacgaacactttaccgaggatttccaagtcgtgggactgagagtcgccatcacgtgaaaggacgaccgtaatattctcgccatcgtgacggaagcaaccgaagctcagagccgtgaagcgtttagccagcatgaatacacccttgtcttcaccgttgtagtaggcgatgtctgttcccagcatatcgacgatagcgtcttcaccggagaagccttgcttagcagccagacgggacagtgctttcagttggctctcatgagcgataataccgtagtcagacacctcagaaccgaaagaagactctgtgttctcatacagagcgtccatgatagcgtctgccttagcggtcaggctaccagtcaggacaggaagctctacggtcttcagcagcttagaggattccagaacgtcgaccatgcgagcgttgatggtacggaccacattctcacagatgttcatagcgtcctgctgaagtgtgccctgagtgaatccggtggatgacttggcgtcccagagcttggtctgctcagagatgagaatagcctgctcgattggttcgaccacgatttcttgtccagacggaacggtcacgacttcaggtcgcttgccaccacggacaggaacgaccacagagcggtcagtcagagtgtgggcaatgattggggtcggtaagctgttacgggtcggcaggacttctacagggaacgggatgttctcttgagcgtccttaagtacaccgttcagcatagccttaaccgtcttagctaactggagggcgtagacctgcgggtcagcgttagtcggcagaccttcattgacctgaatgttgtcggtatcggtgatgcgtactggctcaatgccaaactggaaagcgtctttaatcgtcataataatcaatctcctaaattagtttaaatactgtgagtcctcaaaactgaggagtccctaacatcgggtcagggactgtgtgtcttataagctgtccagccagttaccgcctgactcaaggtcagcgacaatagcggcacgggagcgaccagcggaatgggtagcactgcggaggttctcaccataggtccggcgttcagctttgacctgttcgcggcgctgtagctctttctgccactctgcatcagtcatgttctcttcacgcatgcgctcggcctgaatgcgctgctctttagcgatacgctcagcctcagctcgcttgttctgctggcggcgaccataggcggtcatcaggtcattactgaagaagttgccaatagctacaccagcttcagccagagcttccagtaactccatagactcacggctggtagacggcagtcctgacaggtagcccggaatcagggtcttgatagcgagcgacaacggataggactgaccgtccagactcacagtgttttcataaaggttgatgtcggtgactgacagcttccagttgttgttgttgaacatcataggtaattctcctcttgagagttgagactatcggtatcgcagacgcagtagcgcctacgggtctccccgcatcggtcatctcaaaaggttttaaaattaggcagacagtttcatagcgaccagttgcgctatcagctcgtctcgggattggtgctggcgggtctcatcttccgggtctagaccaagctctctgaggaggacttcagtccggtagccacggtaacggagagtcatgcggccctcaggtgtgcgtgggtcaatcatcttagagtcctcccttagcgcacagacgaaccagctcgaccttgttggacttaagccactcgtaacccttggtgaggaccttaagcccctcctgaccgttatagtggttatcctgaagacggtaatagccgttctccagacccttaggattgaagctggtcatccagccacctgacgagatgtcaaatacaggctgtcctcgaccgtccagcttgcgactatagaagggattagctatacgccctgacttcaatacggcattaagagccttggctgataccagctttgtacctaacctgaagtcgagattcttaagacactctgtcagggtgtggccctgcttcgggttatccagcttttccagccagttacgggctataggcttgagacccttaagttccttggagtcctgcgccagcgccttagcttccgacactttgtcgttacgtaaagcgatgaaagcacggatgaccttaaggtagaaatcaggtgagacccacatcgcataggcaatagccgcctcttcagtagcccatgtccccggagtcgaaccaccatgagcaacatgcaaatttgcatcttggtcaagaagcgtcctgacgctagaacgccactgacccggctccttagcagatggaagctcaagctctttatgtagctcgttcaggttccacatacggtcctgattacaggcccagtgatagccgtcaacgatgacaggaagaactacttcatgcttcattaagggttgagttgacatatcgttgtactccttttgttatgcctcctgaagtcacaccctgaaagcctactcaagcccccaacgatagggagactcacaggcaacaggagacatacagaaagacttgaggtaataaggtcgtgtgaagaccatgttaacttttttaacaaacccgttttctgggttggttagacttctcgccaacgcgcccaaatttggacccgttaagaatggtgactgctcagttttgagcgcgttaagtcctgaccagacggaaactttttcctactggctactagataactagcgtgtctccatatgtataaaggcgggaccgcatgtcaggacgagctgtaaggacttccagatggtgagcggtgataaacttaagccaatgagtagtgagtagacgagctactaacagatgactgaagaacgctaacgagctggaggtcatacaggaggtctgacagaggcggtcacgggccttgattacttaggagagatacttaatgtcggttgaccagatgctcgcatgttctgacgcatcagactcagaggcggaagcaggtctccctatagtgatagtttagggtctggtcccctatagtgagtgcttattccatcatccctttatcacagagcaccttcttcatgttcacagaggtagcctgaagtacagagttaacgtggcgtaggtagcgaggagacggggagcgacccgtgattgccgtgtaggagatgtcagtattgcgggagaagatatcgttggtgccatataaggcagcgaacaggtaggccttggagaccgggagtcccccgctgttagagagacctgaaggacgtgacagccctgtaaacacatcgtctgcccatgggtaggcctcagcaagctgtgaataggatagacatcctgtttcaatcagccacagcctcacagaccgattgtcgatgaccacaggcggcttacctgtacgggccttaggttcatcataggtcggcgctggtagctgctcatggtcgaggtctccaccgaagaaggcctcattgtcggactctgagtagcattgaattgtaatagccatggatgggcctcctcttaaggttggctacttgcagtgggtagcagcggtttcggttagatggaggacaggcgtgtctctcctagggtgatagttaagggtctgagcccaaacttccgaaggtgagggattattgtaagatactgaaagctaatggaaagttggagggacctgagtttaggacgcagtttaaataagaccacagacagacttagggtcaggcagccgaaggcgaaccagtggacctacagtcaggagggattatgattaatatcaccctccataacttcagtcagacttcagtgacccaaggcacaaaccatagctatctatggtctcccaccttgggtctccctacttaaagtaaagctgtcttcagcacctcagccagtctctggactgcatgtcctttcccgtacaggtcatacgtaatggactgactgctatggcctaagatgccctgagcatccaccagattgactccacgctctttcatgcgggtcgccagccaatgcctcagactgtggagagagacatcctgagagtctcctagggcctcagtcaggaccctagagttaaaccagctagagtatgcgcttggagtcatcccgaagagaggaccctcgtcaggctgcatgtctacccattcgaggaaggacttcaggtcaagaccacaggccccatcggtcaacggcacaagtcggactgaatgcttgttcttcacagacttaccgtccccatcttcgttgatgtcgatacagaccagtccattgtctaaggttacaatgtcacgtttagtcaggtggcagacctcagcagaccgagcgccagtaactacagacaccagagacgcccatctacgggcctcagaggtcgtgtgagccgtgtgtcgtgtgaactgatactcagcctcaacacggaccagaagtctctccagctcctcgtctgtgaacgctctgcgcttggagtcgatatccttggtcagcttcatccgttcaatagggttgcggccctcaagttgcccattcatcagaccgtagtcaagacacatcttcgccttagtcagcagcttgttaatcgtcgacggtctcacctcagaagccagcatagcgtccctgacagccagccactcagagcgggacatcaggtccatgtcttcaggtaagaaccgagagacggtattcagtgaggacgacaggtccttgtagctggatgacttcagggtctggaccttctcagccagcagcgaggacactagctcagaaaaactacagatagctggttggtcagcgatagtgacctcaggttggggctcctgtgtgaaaactgctggtctatccccctgctcattcttcagaattgacgtagagtcgcctatagttgagtaatcagtatgattattatcatcaatcagcttaatcagaccagaggtatcaccagtgtctaccctctgctgtgctgcggtcaggacttcaagcgctaaccttatgcccttctgctggtccagacttaaggcttgcgtagcggctagctccttcaggttggacttctcgtccaccaaagtagcgacctcaagtccattccagtaatcgtcactagcgtctgtcaggaactgctcagccatagaccggaggtgctctgtaagctcctgtagcgagacatcaggcctatccaacatgaaggacttagctgtggctgcaagctctctctgacgcattgtggctactctcctgtctgtgcttcgggtcgatactgaaagaaacgggatggtctgtcccttgagtctgaagcggatagtatatcgaccattggctctacggactaactgaggcttagcaagtagcgagcaagccacgccgagtaggttgatttgtgtcagccttgtgtcaggacttgaggtgtagacttgctgatacagatagggagacccagagaaagaactggatggatatacagtattgtcatggttaatgtcagtcatatcaggaccttaagtagcgttgagtcaactacttcaagtccgtccatccgtctgacagtggagtccatctggaactacgcgggaaataccctggttaatcagcattctgacatcaacaaaacgcatgaaattctgcaagacgaatcgaaatgcgaaatgattgtggtcatcgaaaactttatgacctcatcggcaaaatatgccgacattctgctgccagacctgatgaccgttgagcaggaagatattattcctaacgactacgccggtaacatgggatatctcattttcctccagccagtcaccagcgaaaaattcgaacgtaaaccgatttactggatcctgagtgaagtcgcgaaacgtcttggacctgacgtctatcaaaagttcacagaaggtcgcacgcaggaacaatggttacaacatctgtacgccaaaatgcttgccaaagatccggcgttaccgtcttacgacgaactgaaaaaaatgggtatctataagtgtaaagatcccaatggtcattttgtcgcctacaaagcatttcgtgacgaccccgaggcaaatccacttaaaacgccttccggtaagattgaaatttattccagcaggctggcggaaattgcccgtacctgggaactggaaaaagatgaagtgataagcccattgccagtttatgcctcaacctttgaaggctgggactcccctgaacgtagaaccttcccactgcaactgtttggtttccattacaaatcccgtactcactcgacctacggcaatattgatctcttgaaggctgcctgccgtcaggaggtgtggatcaaccctatagatgcgcagaaacgtgggattgccaacggcgatatggttcgggtgtttaaccatcgtggcgaagttcggctaccagccaaagtaacaccacgcattctccctggagttagcgctatgggccagggagcctggcacgaggccaatatgtctggcgataaaatcgaccatggaggctgtgtgaatacgctaaccactctgcgcccttcaccactggcgaagggaaacccgcagcacactaatctggtcgagatcgaaaaaatataacccacgacaaccataaattctggcatgacattttgtttgaaaagcaataagtgagtaatgatgaaaatccataccacagaggcgctcatgaaggctgaaatcagccgtagaagtctgatgaaaacctccgcacttggcagtcttgcgctggcaagcagtgctttcactctgccattttcccaaatggtccgggcggcagaggctccggtagaagagaaagcggtctggagttcctgcaccgttaactgcgggagccgcagtctgttacgtttgcatgtgaaagatgacaccgtgtactgggtggagtctgatacgacaggtgacgacgtctacggtaatcatcaggttcgagcgtgtttacgcggacgctctatccgccgacggatgaatcatcctgataggttgaaatatcccatgaagcgcgtcggcaagcgcggtgaaggtaaatttgaacggataagttgggacgaagccctggataccatcagtgataatcttcggcggatcctaaaagattacggcaatgaggctgtacatgttctctatggaacaggcgtagatggtggaaacatcaccaactcaaacgtcccgtaccgtctgatgaactcttgtggtggttttctcagtcgctatggcagctacagtaccgcacagatcagtgccgcaatgagttatatgttcggtgccaatgatggcaacagcccggatgatatcgccaatacgaagctggtcgttatgttcggaaataacccggcagaaacgcggatgagcggcggtggtgtcacttactacgtcgagcaagcccgcgaacgttcaaacgcacgcatgatcgtcatcgatccacgttataacgacacagctgccggacgtgaagatgaatggctacccattcgccctggcaccgatggcgcactggcctgtgcgattgcctgggtactgattacggaaaacatggtcgatcagccatttctcgacaaatattgtgttggttacgatgaaaaaacgctgcccgccaacgcaccacgtaacgcgcattataaagcctatattctgggcgaagggcctgacggcatagctaaaacgccggaatgggcagcaaaaatcaccagcataccggcagaaaaaattatccagttggcacgagagatcggttcagcaaaacctgcttatatttgtcagggttgggggccacaacgacactccaacggcgaacaaacgtcccgcgctattgccatgctttccgttctcaccggtaacgtcggcataaacggcggcaactcaggtgtacgcgaaggtagctgggatctgggggtagaatggttcccgatgcttgagaatcctgttaaaacgcagatttccgtctttacatggacagatgccatcgaccacggtacggaaatgaccgcgacccgtgatggtgttcgtggaaaagaaaaactggatgtccccatcaagtttttatggtgctacgccagtaacacattgatcaatcaacatggcgacatcaatcacacccatgaggtgcttcaggatgacagcaagtgcgagatgattgttggcattgaccattttatgaccgcctcagcaaaatattgcgatatcctgctgcccgacctgatgccaacagagcaagaagacctcatctctcatgagtctgccgggaatatgggctatgtgatcctcgcccaacccgcaacctcggcaaaattcgaacgcaaacctatctactggatgttgagtgaaattgcgaaacgtttaggaccagacgtttatcaaaccttcactgaaggtcgtagccaacatgaatggatcaaataccttcatgcgaaaacgaaggaacgtaatccggaaatgcccgactacgaggagatgaaaacgaccgggatctttaagaaaaaatgcccggaagaacactacgtcgctttccgcgcattccgtgaagatccccaggcaaacccgttgaaaacaccttcggggaaaatcgaaatttattctgaacgactggcgaagattgcggatacctgggaattgaaaaaagatgaaattattcatccccttccagcttatacgccaggttttgatggctgggacgatcccctgcggaaaacctatccactgcagttaacgggcttccactacaaagcgcgtacccactccagctacggcaatattgatgtgttacagcaggcctgcccacaagaggtgtggatcaaccccattgatgctcaggcacgcggtatccgtcatggcgataccgtgcgggtatttaacaataatggagaaatgctgattgccgcaaaagtgactccgcgtattctgcctggcgttaccgccatcgggcaaggtgcttggcttaaagcggatatgtttggtgaccgggtcgatcacggcggcagtatcaatattctgacctcgcaccgcccttcaccgctggcaaagggaaacccgtcgcacagcaatcttgtccagatcgaaaaggtttaaggagtagcccatgaccacacaatatggattttttatcgattccagccgctgtactggctgtaaaacctgcgaactggcgtgcaaagattttaaagatcttggcccggaagtcagtttccgccgtatttatgaatatgctggcggcgactggcaggaagataatggcgtctggcaccagaacgtgttcgcttattatctctccatctcctgtaaccattgcgatgaccccgcatgtacaaaagtctgccccagcggcgcaatgcataagcgtgaagatggctttgtggtggttgatgaagatgtttgtatcggctgccgctactgccacatggcttgtccgtacggcgcaccacagtacaatgctgaaaaagggcacatgacgaagtgcgatggttgttattcgcgtgtcgccgaggggaaacaacccatatgcgtcgaatcctgcccgctgcgtgcacttgagttcggtccaattgaagagctgcgccagaagcacggcactctggctgccgtcgcgccactgccgcgcgcgcatttcacaaaacccaatatcgttatcaaacctaacgccaacagccgcccgaccggcgataccactggttatctggctaatccggaggaagtgtaaaatgggaaatggatggcatgaatggccactggttatctttaccgtattgggtcaatgcgtagtaggcgcgctgattgttagcggaattggctggttcgccgccaaaaatgacgcagaccgtcagcacattgttcgtggcatgtttttcctctggctgttgatgggcatcgggtttattgcctctgtcatgcacctgggatcgccactgcgggcgtttaactcgctgaatcgaatcggagcttctggtctgagtaacgagattgctgccggttccatattttttgccgttggcggactatggtggctggtggcggtcatcggtaaaatgccgcaagcgttggggaaactctggttacttgtcagcatggcgctcggcgtcattttcgtctggatgatgacctgcgtgtatcaaatcgacactgtgccaacctggcataacggttacactacgctggctttcttcctgacggtattgttgagtggtccaatacttgctgccgcaattctgcgggcagcccgcgttacatttaataccacaccatttgccatcattagcgttctggcgctgatcgcttgtgccggggtgattgtgctgcaaggtttgtctctgtcgtctattcactcatccgtgcaacaagccagcgcactggtaccagattacgcctccttacaggtctggcgtgtggtattgttatgcgcaggtcttggatgctggctttgtccgctcattcgtcgccgtgaacctcacgttgccggacttattctggggctaatcctcatacttggcggtgagatgatcgggcgtgtgctcttttatggcctgcacatgacagtaggaatggctattgcaggttaacaaattggtgcggggcaacccgcacatttcaggatgttaggaatgacccatttttcacagcaagataatttttctgtcgcggcgcgcgtgttgggcgcgctgttttattacgctccagagagtgcggaagccgcacctctggttgcggtactcaccagtgacggctgggaaactcagtggcctctaccagaagcgtcattagcgccgctggtgacggcttttcagacacagtgtgaagagactcacgcccaggcctggcagcgtttgtttgtcggcccgtgggcactgccgtctccgccgtgggggtcggtctggctggatcgcgaatctgtgctgtttggcgattcaacattggcacttcgtcagtggatgcgcgagaaaggcattcagtttgaaatgaagcaaaacgaaccggaagatcattttggttcactgctgttgatggctgcgtggttggcggagaatggtcgccagacagaatgcgaagaattgctggcatggcacctttttccgtggtcaacacgttttcttgatgtttttatcgaaaaagcagaacaccctttctaccgtgcactgggtgaactggctcgcttaacactggcgcaatggcaatcacaactgttaattcctgtcgcggttaaaccgctgtttcgataggatcaccgtaatattgccggatggtgacgattacgcgcaatccggcaataataggttacagtgtcacgtttttttatctcttaaagtacgcactgcttttgcggctggcctcttttgccgcaaaatagtcgcccgtgtttcattgcccatttctgctcatgcatcatctacacatctatccggatctgcgcactatgttccgccgtctgcttatcgcaacagtcgtcggtattctcgcggcctttgccgttgccgggtttcgtcatgcgatgctgctactggagtggttgttcctcaataatgactccggcagtctggtcaatgcagcgacaaacctttccccctggcgacggttgctaactccggcgctcggcggactggcggcgggtttgttgctgatgggctggcagaaatttacccaacaacgccctcatgcgccgaccgattatatggaagcgttgcaaaccgatggacagttcgattacgcagcaagcctggttaaatcgcttgcctctctgctggtagtaaccagcggcagtgcaattggtcgcgaaggtgcgatgattcttttagctgcccttgccgcctcctgttttgcccaacgttttacgccacgccaggagtggaaattatggatcgcctgtggggccgcggcgggaatggctgcggcctatcgtgccccgcttgctggcagtttatttatagccgaagtgctgtttggcactatgatgttggcctctctcggcccggtgattatttccgccgtcgtggcattgctggttagcaatctgattaatcatagcgacgcgttactctacaacgtacaactctcagtgacggttcaggctcgtgactatgcgctgattatcagtacaggtgtgctggcaggtctgtgcggaccactgttgttaacgttaatgaacgcctgtcatcgtggatttgtgagtctcaaacttgcgccgccctggcaactggcactaggcgggttgatcgtgggtctgctttccctgttcacacctgcagtgtggggcaacggctatagcaccgtacaatcctttttaaccgccccaccactgttaatgatcattgccgggatcttcctttgtaaactgtgtgccgtgctggcgagtagcggttccggcgcacccggtggggtctttacaccgacgctatttatcggtcttgccattggcatgttgtatggtcgtagcctgggattatggttccctgatggcgaagaaattacacttttactcggattgaccgggatggcgacactgttggcggcgaccacgcacgcgccgattatgtcgacgttgatgatatgtgaaatgaccggggagtatcagctactccccggtttattgattgcctgcgtaattgcgtcggtaatttcgcggacgttacaccgtgactctatctaccgccagcacactgcgcagcatagctaagcggatgtattgccccagttcacgctgttcggcgcgcggcagataaggcagttcaccaatgagcggtgccggaagttttttacccagcacatcaatgatttccgcataatgcgccagtcctgggttgattcggttagccacccagccaatgagcggcagcccgtcgttggcgatcgcctgagctgttagcagtgcatggttaatgcaaccttcctgaataccgacaaccatcaacaccggcagttgttcctgcactacccattcagagagtggacgcaaatcattcatcagactgcgccagccgccagtcccttctaccacgacatgatcgactttttcggtcaggtttgccaggccgtttgaaatgagggtgtaattgattgggcaactgtgcgccacgctactttcttcttcgcttaacgcgataggattaactgcttcataaggcagttcgatggttgaaacactctgcaacaccagggcatctttattacgcagcccttcgggtgtctctttgctccccttcgctacgggtttatatcccgcaaccgtttttccctgggaggctaacgcttgtagcaatgcgcgggaaaccaccgttttccctacagaagtgtctgtaccggtaataaagaaacgcttcagcatcactaactccaccgttatgcttcacaaatataaaccaggaaaataattaaccttgaaagtctaagttatgctttcctggcccaaattgagatagcgcaaattttggtagaacagttaaaaaatgttaaccctgcaacagacgaatcaacaaagaaccgttatacatcgcgtcttttaccagtgcagcgcctgccatcgtgccctggttagaaaactgagtactctcaacgctgatgtgctgactatacgcaggaagggcctgctgacggatgctgtctgagatgaccgggaagaggatatctgccgctttacttaacggtgagccaatcagtattttttgtgggttaaataaattcaccatgatggcaagaatgcgcccgacatgcgcgcccaccccggtaatgatgtcttttgccagtagatcgccgcgcaatgccgcctgacacaatgagtccacggttaacggttgtccatgtaacatcgagctcatggattgattaagacgcagctgtgccagctcaagaatactgtccacgctggcgatggtttcgaggcagccgtgattcccgcaataacagcgtttcccatacgggtcgacctgtgtgtggcctatttccacgagactactgctgcctgcgtgtagcagatgaccatcggtaatgacgcccgcccccacgttgtgatcgataaccacctgaatcacatcgcgcgccccgcgtgaggcaccaaacaaggcctctgccatcgtccatgcgctgatatcatgctgaatataaaccggaacgccggtatgctgctccagcgcctcgccgagcggcatctcttttacatcctcgtagaacggcatgcgatgtacaataccattttccgtatcaataattcccggcaaggttatggcaatcgaagttagacgctcaagttttttctggtggcggataaaaaactgatcgatatgggaaataatacgatccagcaatggcaagtcatcttttaacgccagttcctgcgactcttccaccaccagtttgctgctcagatcgcgcagagcaaggaaaatctccccgcgactaatgcgcagagaaagatagtgccaggcttcagtttcaaccaccagccccaccgccggacggccacggttccccgcttctttgatttccagctcttgcaccaagtgtgcttcgagcatctcacggacaattttagtgatactggcaggagccagttgcgccagacgggaaagatcgatacgcgagactggaccaagctgatcaatcaggcgataaaccgcgcccgcgttggtctgctttatttgatcaatgtgcccaggctggttttcagcaaccaccgcatactccctatattttcgcgctccgaaataatctgtaggctatggtgaagcacttcaatacgtgtcgtcaaatttttacttaggcatgtgattaacagcacatttttcgggctttttcgctgaaatttccctcacctgagagcattcagcagatgaatacgaaagttacgcgcagccggactttgttcatgatgtttcggccagaccaaccacatttcagaaaccgcatcctcttcagcaatcggcacccagcgcatttcgttgagctgaacacgtttaaatgacgcaggcaaaattgaaacacccagaccggcggaaaccagaccgatgatggtcattgcctcgcccacctcctgagtgatgacgggcgtcaaatggtaacgtcgcatcagcccgagaatatcgtcatacagccctgtcccgacgtgcggatcaaaaaagacaaagggttctttcgccagttcagccagcgttacattcgggttatttgccaggggatgatcgtgcgggatcatcgccataagcggttcatggacgatgactgcgtgttcaagcgactccggtaacgctgtgttacgcagcaatcccatatccagcgttccttcaatgagcggagcgatttgctcgcgagtgttcatttcgcgggtttgtaaatggacatcaggataatcacggcgaaacagcgataacgtatcggacaccgcccgaataaaaggagccgacgaagtaaaaccaatgcgcaactcccccgcttcaccctgatgcagcctttcagcgcgagcggcagcgtcatccaccatagacaggatttgccgactatctgcaagaaactgttttcctgctgccgtcagcaatacactgcgattggttcgtgccagcagtcgggcaccaatttgttgctccagcgcctgaatctgctgacttagcggcggttgcgaaatattcaggcgggcagcggcgcgcccgaaatgcagctcttccgcaacagcaacaaagtaacgcagatgacgaagttcaatattcatatttaaaacatcttatttgagattattaatatattagacagaacaattcgattttcctaccctatgtataagcctgatctacaggcatatttagcaaggatttcaagtgagccgtactacaactgttgatggcgctccggcaagcgacactgacaagcaaagcatttctcagccaaatcaatttattaaacgcggtacgccgcaatttatgcgcgtcaccctggcgctgttctctgccggactggcaacatttgcacttctctattgtgtgcagcctatccttccggtgctttcgcaggagtttggcttaacccccgcgaacagtagtatttcactgtccatttccacggcgatgttggctattggtttgctgtttactggcccgctatccgatgccattggtcgcaaaccagtgatggtcacggcgctactgttggcctccatttgtacgttactttcgacaatgatgaccagctggcacggcattttgattatgcgcgccttgattgggctttcgttaagtggcgtggcagctgttggcatgacttatcttagcgaggaaatccatcccagtttcgtggccttttcaatggggttgtatatcagcggcaactcaattggcggcatgagcggacgcttaattagcggtgtcttcacggactttttcaactggcgaattgctctggcggcaatcggttgtttcgcgctggcctcggcgttgatgttctggaaaatcctccctgaatcacgccattttcgcccgacttcgctgcgccctaagacgttgtttatcaactttcgtctgcactggcgtgaccggggattaccgttattgttcgcagaaggctttttgctgatggggtcgttcgtcacgctgtttaattacatcggctatcggttgatgctctccccctggcatgtcagtcaggccgtggttggcttattatcgctggcttatttgaccggtacatggagctcacccaaagccggaaccatgaccacccgctatgggcgtggtccagtgatgttgttttcgacgggggttatgctgtttggtttactgatgaccttattcagctcgctgtggctgatctttgccggaatgttactcttctcagcaggattcttcgcagcccactcagtagccagcagctggatcggcccccgcgcaaaacgcgctaaaggccaggcctcctcgctgtatctgttcagttactatctggggtcgagtattgccgggacgctgggtggtgttttctggcataactatggctggaacggcgtcggcgcatttattgctctgatgctggtcattgctctgctggtcgggacgcgtttgcatcgtcgtctgcacgcctgaaaaataagtccggactgcggtaaatacccgtccggacttattgccagctcaaaccaacgttaatagccatcctaaaatagacgaagcgccagccaattcccgcagcgcgtctagcgtcatcaggattataagtacccaaataaacggattcattttgctgtgtgtcatttattactgatgcgcagttattctactgctttgtaagtagtaaaatagttaacccgatcaagactactattattggtagctaaatttcccttaagtcacaatacgttattatcaacgctgtaatttattcagcgtttgtacatatcgttacacgctgaaaccaaccactcacggaagtctgccattcccagggatatagttatttcaacggccccgcagtggggttaaatgaaaaaacaaattgagggtatgacaatgaaaaaagtattagctctggttgttgccgctgctatgggtctgtcttctgccgcctttgctgcagagactacgaccacacctgctccgactgcgacgaccaccaaagcagcgccggcgaaaactacacatcataaaaaacagcataaagcagcacctgcccagaaagcgcaggcggctaaaaagcatcataaaaatacgaaagctgaacagaaagcccctgaacaaaaagcgcaggcagcgaagaaacacgccaagaaacacagccatcagcaaccggcaaaacctgctgcacaacccgcagcgtaagttttcaacagtaatgctggcgcgccccctcgcgcctgaaaattacggtgctaagcgggtaacgtttagcaccgcctttagcggagggtagtatggtgggccgttatcgctttgagttcattctgatcatccttattttatgcgcactgattgccgcccgtttttatctttcctgattgtagttatctgattttactcccactttcatcccgtcccgtctatagtatttatgagggtttgcttttaataatcataattacccaccagagtgtgatatgcgtacaaccattgctgtagtgttgggtgcaattagtttgacgtctgcttttgtgtttgcagataaaccagacgttgccagatcggcaaacgatgaggtcagcaccctgttttttggtcatgatgatcgtgtgccagtgaatgacacgacccaatcaccgtgggatgcggttgggcaactggaaacggccagcggcaatttatgtacggcgacgctgattgcacccaatctggcattaacggcaggacactgtttattgacacctccaaagggtaaagccgataaagcagtggcgctgcgttttgtgtcaaataaaggtctttggcgctatgagatccacgacatagaaggccgcgttgatccgacactgggaaagcggttaaaagcagatggggatggttggattgtacctcccgcagccgcgccgtgggacttcggattgattgtgctacgtaatcccccttctggcattacgccgttgccgttatttgagggagataaagccgcgcttaccgccgcattaaaagcggcaggtcgtaaagtgactcaggcaggctaccctgaagatcatctcgatacgttgtacagtcatcaaaactgtgaagtgactggctgggcgcaaacgtcggtgatgtcacatcagtgcgataccttgccgggtgacagcggttcgcctctgatgttgcataccgatgacggctggcaattaattggggtgcaaagttcggctcctgccgcgaaagatcgctggcgcgccgataaccgggccatttctgttaccggttttcgcgacaagctggatcaactgtcgcaaaaataatgttcaaacgctgcccgacagcgcgggcagcgtcttcatcaggcaagtttcaccatgatcattccagccaacagcaagaccaggccaatccagcctttacgatttaaccgttgaccaaacaagatccaacctgcggctaacgtggcggcaataccaaacccgccccacaatgcataagcgacagacaagtcgatccctttaacggcttgagaaagcgcactaaaggcagccagcaccgccgccagggagagcaagccaaatattttgcgacgaaagccgtcagaaaatttcaaaaagacgttagcaacgatttccagcacgattgccaatgccagccaggcggcgtgaacccattcaaactgcgccatggttcacctccagttcaggtttacgcgctttacgggtacctgattttatcaacacaatcccggcgaccagggtggttaacccggcaattttcatcagcgataaactttcgtcgaataacaaaacgctaaacaaggtaataaataaaataccgataccttcccacagcgcataagctacgcctaaggcgatttttttaacggcgaaagagagaaatatatacgacagagaaatcatcaccagcattaaaataaagccgccatttccctcactgacgctcgcccatttcattgacagcgtaccggtaatttctgtagcaatagccagacctaataaaatccaataaatatacattgtccttctcctgcaagagaattattttaattttcgcttaattcagcgaaaccaaagtaaagtggtcaagccccgcgcatagcgcaagctttggcagaagaaaggactaaagcgcgttgcgccagtgctgctcacctacgagcaagatagtggatgaggtacgaagatgggtaaatgtagaaaataacgtcctgaacaaattgtccataatattacaattatccgcagtgttgcttctcgtcatcgcggatgataattgtcctcggtagttgaacacgcctgatttgtatcatagcttaagaattaactcaaaatattttcacttctttacctgagcggtttgattttcgttatgatgacggagcgaaaaagacattattattagcaaaggaagaaaaaacggggacaagcatggcaaagccgatcatcacgctcaatggcctaaaaatcgtcattatgttgggaatgctggtcattattctctgcggtatccgttttgccgccgagatcatcgtgccgtttattctcgcattatttattgctgttattcttaacccgctggtgcaacacatggtccgctggcgtgtgccgcgtgtactggcggtgtcgattttgatgaccatcatcgtgatggcgatggtgttgctattagcttatctgggttccgcgctcaacgagttgacgcggacgttaccgcaatatcgcaactctattatgacgccgctgcaagcgcttgaaccgttgttgcaacgcgtagggattgacgtctcagttgaccagctggcgcattatattgatccgaacgcggcgatgacgttgctcaccaacttattgacgcagttatctaatgccatgtcatcaatatttttattgctgctgacggtgctgtttatgctgctcgaagtgccacaattgcccggaaaatttcagcaaatgatggcgcgtccggttgaagggatggcggcgattcaacgtgcgattgacagtgtttctcattatctggtgctgaaaacagccatcagcatcatcaccggcctggtcgcctgggcgatgctcgccgcactcgatgttcgcttcgcttttgtctggggattgctggcctttgcgcttaattacatcccgaatattggttcagtcctcgcggcaatcccccctatcgctcaggtactggtgtttaatggcttctacgaagcgttgctggtgctggcgggatatctgctgattaatctggtcttcggcaatattctggagccgcgtatcatggggcgtgggctggggctttccacattggtggtatttttgtcgttgattttttggggatggttgttaggaccggtgggtatgctgctttccgtgccgttgacaattattgtcaaaattgcgcttgaacaaacagcgggaggtcaaagcatcgccgttctgttaagcgatctcaataaagagtgacggcctcagcagaggccgtcagggttacagagctttcaggattgcatccacgctggctttggcgtcaccaaacagcatgtgggtgttttccttgaagaacagcgggttttgcacaccagcatagccagtgttcatcgaacgtttaaagacaatcacgttctgcgctttccacacttccagcacaggcataccagcaatcggactcttcggatcatcctgcgccgccgggttaaccgtatcgttagcaccaatcaccagtacggtatcggtatcagcaaagtcatcattgatctcgtccatttccagcacgatgtcatacggtacttttgcttcagccagcaatacgttcatatgtccaggcaaacgccccgcgaccgggtggataccgaaacgcacattaataccacgagcgcgcaatttctcagtaatttcagcgacaggatattgcgcctgcgcgactgccatgccgtaccccggagtaatgatcactgaatgggagtttttcagcagttccgctgtctcttctgcggtgatttcgcggtgctcacccacttcctgatcatcgccagtagaagagccgtcggtgccgaaaccacccgcaataacgctgataaaggaacggttcatcgccttacacataatgtaagaaaggatagcccccgaagaaccgaccagcgcaccggtcacaatcagcaggtcgttgctgagcataaagcccgcagccgcagccgcccagccggagtacgagttcagcatcgacaccaccactggcatatctgcaccaccgatggaggcgactaaatgccagccgaataccagcgcaattgcggtcattatcagcaatgccagcacttgcaggccgacgctgtccgtgcgaacaaatacaatcagcagcaggaaggaaacgaccagagccgccaggttcattttgtgacggtttggcagcatcaatggtttagacgaaatcttgccacacagtttgccgaacgccaccaccgaacccgtgaacgttaccgccccgatgaagataccgaggaacacttccgtcaggtgaatattgaccagaatcggtgccattcccgcgtcatgatgcagatagctgttaaagccaaccagcactgccgccagacccacgaagctatgcaggatcgccaccagttctggcatttcggtcatttcaactttcttcgccagacggataccaattgccccaccaatgaccatcgccagcaagatccagccaacattacccgtatccggtccaaaaatggttgcgattaacgcaatcgccatcccggcgataccgaagttgttaccctggcgagacgtttcatgtttcgaaagaccggccagactgaagataaacaggatcgcggcaacaatgtatgcagctgtaactaatcctccagacatatgttaccccttaatttttgcggaacattttcagcatgcgctgagtcacggtgaagccaccgaaaatattaatgctggctataagcaccgcgataaaactaaggaagctaacccagccgccctggccaatctgcaacagtgctccgacaacaataatccctgaaatcgcgttggtgaccgacatcaacggtgtatgcagcgcgtgcgatacattccacaccacgtaataaccgacaacgcaggccagcgcgaaaacggtgaagtgcccaaggaattctttcggcgcaacgcttgccatccagccaaaaagaatgattgccagcgccatcaacgcgtatttacgccacggtgagcaggtacatttttcctcagttttcacttccggtgccgctttttgtgccgcctgcggctgagctgatacctgaatcggcggtgccggccaggtaatttcgcccgcacggatcacggtcacgccgcgaatcaccacatcatcaaaatcaacagtgatattgccgtctttctctttgcacaacagtttcagcagattaacgaggtttgtgccgtaaagctgtgaggattgcgtcggcagacggcccggaagatcggtataaccaatcactttgacaccattttccgtagtgaagatttcacccggcacggtgtattcacagttgccgccgttttgggctgccaggtcgacaatcacactgcccgccttcatggagtcaaccatttcacgggtaattagcttcggcgctggtttgcctggaataagcgcggtggtgacaatgatatcgacctcttttgcctgggcggcaaagagttccatttccgctttgatgaacgcgtccgacatcactttggcatagccatcgccgctgccagcttcctctttaaaatccagctcgaggaattccgcgcccatactttgaacttgttctttcacttccgggcgggtgtcgaatgcacgcacaatcgcgccgagactgtttgctgcgccaatggcggccagacctgcaacacccgcaccaatcaccatcacttttgccggtggcactttcccggccgcagtaatttgcccggtaaagaagcgcccaaattcatgtgccgcttcaacaatggcgcgataaccggcgatgttcgccatcgagcttagtgcgtccagcgattgtgcgcgtgagatacgcggcacagagtccatcgccatcacggtcacgttacgttccgcaagtttttgcattaattccggattctgcgcaggccagataaaactcaccagcgttgtcccaggattcagtaacgcaatttcatcatctaacggcgcattgaccttcagaatgatctctgactgccagacgctattcccttctacaatttcagcgcccgcttgcacaaacgctttatcgtcaaaacttgccagttgacccgcgccgctctctaccgcgacggtaaaacccagtttcagcagctgttccactgtttttggcgttgctgcaacacgggtttcattggttaaccgttctcttggtatgccaattcgcatgatattcccttccatcggttttattgatgatggtttgcctgtgtcaggagccacacaagctgctcatgtacgagctaaatgttactccgttaaaataaattagtaacaaacgccctataacgtactgaaaattatgcctgtgatctagcgccaaaaatcagtatttcggcgtgaactcgcaaaatattaacgattcagccgtgatagtgggataaacaccttagaacgccggataaagactgataattgtcttcgacggtcgggtaaaacgagacatcgccccggcacgaatcactacttaacattaaattaacttatacaattcagttgcttcagtagtaatgatgctgatacggctgttttttaagcatagacggtcatttgagcaggattaaaattggcttaaggaatgtgatatgaaaaatgacgcagacagttacaccgtttaaatgcaataatcagccacgtttctcgttaataacaataccagtacctggtttgcgcaaggcgaaggattatttttatgaagcttaagaacaccctcctggcgtcggcactgctttctgctacggcattctccgttaacgcagcaacagaactgacaccggagcaagcggcagcggttaaaccttttgaccgtgtagtggttaccggtcgttttaatgctattggcgaagcggtgaaagccgtttctcgtcgcgcagataaagaaggtgccgcctctttttatgttgtcgacacttctgattttggtaacagcggtaactggcgtgtggtcgctgacctctataaagccgatgctgaaaaagcagaagaaacaagtaatcgcgtaattaacggtgttgtcgaactgccgaaagatcaggctgttctgattgaaccgtttgacacggtcaccgtccagggcttctatcgtagccagccagaagtcaatgatgccatcaccaaagcggcaaaagcgaaaggtgcctactctttctacatcgttcgtcaaatcgatgccaaccagggcggcaaccagcgtattactgcattcatctataaaaaagatgctaagaaacgtatcgtccagagcccggatgtgatcccggcagactccgaagcaggacgtgcagctctggctgccggtggcgaagccgcgaagaaagttgagatcccgggtgttgcgactaccgcatcaccaagttctgaagtcggtcgcttctttgaaacccagtcatcaaaaggcgggcgttacaccgtcacgctcccggatggcactaaagtcgaagaactgaacaaagcgaccgcagcgatgatggtcccgttcgacagcatcaaattctctggcaactacggcaacatgaccgaagtctcctatcaggttgcgaaacgtgccgcgaagaaaggtgctaagtattaccacatcacccgccagtggcaggaacgtggtaataacctgaccgtcagcgcagatctgtataaataactattcagttactcctataaggcggcttgatgccgcctttcgcatttttagtcacaaatttccccgcgaccattgcatgcagacacatctcttcgtaaaatcccgcgcttcagtggcaaactccatttttatgcgttttgccctaatatttattcttcttatcacgttttaatcactggatatcgatggaaaagaaactgggactgagcgcactcaccgcgctggtattaagctcaatgctgggcgcgggtgttttcagtctgccgcaaaatatggcggcagttgccagcccggcagcactgctcatcggctggggtattactggcgctggcattttattgctggcctttgccatgctgatcctcacgcgcattcgtcccgaacttgacggcggtatctttacctatgcccgcgaagggtttggcgagctaatcggcttttgttccgcatggggatactggctgtgcgcagtcatcgccaacgtctcctatctggtgatcgttttttccgcgttaagcttttttacggacacgccggaattgcgcctgtttggcgatggtaatacctggcaatcgatagtcggtgcatcggctttattgtggattgttcactttttgatcctgcgcggggtgcaaaccgctgccagcattaacctggtggcgacactggcaaaattgttgccgctgggtctgtttgttgtgctggcgatgatgatgttcaaactggataccttcaagctcgacttcaccggacttgcacttggcgtacccgtttgggaacaggtgaaaaacaccatgctgatcaccctgtgggttttcattggtgtggaaggtgccgtggttgtttctgcgcgtgcgcgtaataaacgtgatgttggcaaagcgacactgctggcggttctctccgctctgggcgtttacttgctggtaacgctgctttcgctgggtgtggtggcacgtcctgaactggctgaaattcgtaacccgtcaatggccggtctgatggtggaaatgatgggaccatggggcgaaatcatcatcgctgccggtttgatcgtttccgtttgcggcgcgtacttaagctggaccatcatggcagcagaagtaccgttcctggccgccactcataaagcattcccgcgcatttttgcgcgccagaacgcacaagctgcgccatccgcctcactgtggttgaccaacatctgcgtgcaaatttgtctggtactcatctggctgaccggttccgattacaacacgttgctgaccatcgcctcagaaatgattctggtgccctatttcctggtcggcgcgttcttgctgaaaatcgcaacccgtccactgcataaagcggtaggtgtcggtgcctgcatttatggcttatggttattgtacgcctctggtccaatgcacttgctgttatccgttgttctgtatgcaccggggctgctggttttcctgtacgcgcgcaaaacgcatacccatgataatgtactgaaccgtcaggaaatggtgctgattggcatgctgttaattgcctcagttccggcgacctggatgctggtgggataacgttcatcccatcgttggatagcaaaggagataacgatgggtaaaacccagcccttgccaatattaattactggcggaggtcgtcgcatcggcctcgccctcgcatggcatttcattaatcaaaagcaaccggtgattgtcagctatcggacacactatccagccattgatggactgattaatgcaggtgcgcagtgtattcaggctgatttttcgaccaacgacggtgtgatggcgtttgccgatgaagtactaaaaagcacccatggtctgcgtgctattttgcataacgccagtgcgtggatggcggaaaaaccgggtgcgccactggccgacgtactggcttgcatgatgcagatccacgttaataccccatacctgctcaaccatgcgctggaaagattactgcgtgggcacggacacgccgccagcgatatcattcactttaccgattatgtggtggagcgcggtagcgacaaacatattgcgtatgctgcaagcaaagcggcactggataatatgacccgctcgtttgcccgcaagctggcaccggaagtgaaagtgaattctattgcgccatcgctgatcctgtttaatgaacatgatgatgccgaatatcgacaacaggcgctgaataaatcactgatgaaaaccgcgcctggcgagaaagaagtgatcgacctggtcgattacttacttaccagttgctttgtcaccggacgcagtttcccacttgatggcggtcgtcatctgcgttaatgcagctttatccagcatataatcaacacccatgcgcttatcccccaacacgcaacagaaccaacaaaagcggcgggcaagcgcatcattccggtgaaataccacagcgacaccaggtaaacaaaatagggaataatcgaccacatactaaaaatgatggttgcgcgtaaggcttcaatgccgcgttcgctggcaacaatataatgcgcgataagcgcaaaggtcgggaaaagtggaatcagcccggcgatataataatttttcgtttttgctaaaacaccaatcaacagcactaccagcgcaccgagcgcggctttgattaccagccccatctttttaccttaacacttccataacaagtcatcagtagaatacctgatgaaaacttgtttagaaacgattgatagtaagtaaaaacagcgcggtgtattgtgacgtttttatatctaccgtgaatgttatgaacactatcgtatttgtggaagatgatgcggaagtcggttcactgattgccgcgtacctggcaaaacatgatatgcaggttaccgtagagccgcgcggcgaccaggccgaagaaaccattttgcgagaaaatccggatttggtgttactcgacatcatgctaccaggcaaggacggcatgaccatttgtcgtgatttacgcgcaaagtggtctggaccgattgttcttctaacctctctcgatagcgatatgaaccacatcctggcactggaaatgggtgcctgcgactatattctcaaaacgacgccccctgctgttttgctagcgcgtttacgtttgcatttgcgtcagaatgagcaagccacactgaccaaaggtcttcaggaaacgtctctgactccctacaaagccctgcatttcggcacgttgaccatcgatcccatcaaccgcgtagtcaccctggctaacactgaaatctcgctctcgacagctgatttcgaattattgtgggaattagctacccatgccgggcaaatcatggaccgcgatgcattgctgaaaaatttacgcggcgtcagttatgacggactggatcgtagcgtggacgtggctatttcgcggttaagaaaaaaactgctcgataacgccgcagaaccttatcgcattaaaactgtgcgtaacaaaggctatctttttgcgcctcatgcatgggaataagcgatgaaaaaactgtttatccagttttacctgttattgtttgtctgcttccttgtgatgtctctgctggttgggctggtgtacaaatttaccgccgaacgcgcgggcaaacagtcgctggatgatttgatgaacagttcgctgtatctgatgcgcagcgaattgcgtgagatccccccacacgattggggtaaaactctgaaagagatggatttaaatctctctttcgatctgcgtgtcgagccactgagtaaataccatcttgatgatatttccatgcaccgactgcgtggcggcgaaattgtcgccctggacgatcagtacacgtttttgcagcgtatcccgcgcagccactacgtgctggcagttggtcctgttccttatctttattatctccatcagatgcgattgctggatatcgccctgatcgcttttattgctatttccctcgcctttccggtgtttatctggatgcgtccgcactggcaggatatgttaaaactggaagcagcggcgcaacgatttggcgatgggcatctcaatgaacgtatccactttgatgagggttcgagctttgaacgacttggcgtcgcatttaaccagatggcggacaatatcaacgccttaattgccagcaaaaaacagcttattgacggtatcgctcacgaactgcgaacaccgttagtgcgcctgcgttatcgactggagatgagcgataacctgagcgccgccgaatcccaggcgttgaatcgtgatatcagtcaacttgaagctttaattgaagagctgctgacttatgcccgactcgatcgcccacaaaacgagcttcatcttagcgaaccagacctgccgttgtggctgtcaacgcatctggcagatattcaggcagtaacgcccgataaaacggtacggataaaaacgctcgtgcaaggccattatgcggcgttggatatgcgcttaatggagcgcgtgctggataatttgctcaataacgccctgcggtactgccattcaacggttgaaaccagcctgctactgtcggggaatagagcgacattaattgttgaggatgatggcccagggattgccccagaaaaccgcgaacatatctttgaaccttttgttcgcctcgatcccagccgggatcgctcaaccggcggctgcgggctggggctggcaattgtccactctatagcactggcaatgggcggtacggttaattgtgacaccagcgaactgggtggtgcccgcttctcgtttagctggccgttatggcataacatcccgcaatttacctctgcctgacactacgcgcacgatggtcaagtcaccacgactgtgctataaaataagtatgttgtaactaaagtggttaatattatggcgcgttacgatctcgtagaccgactcaacactacctttcgccagatggaacaagagctggctatatttgccgctcatcttgagcaacacaagctattggttgcccgcgtgttctctttgccggaggtaaaaaaagaggatgagcataatccgcttaatcgtattgaggtaaaacaacatctcggcaacgacgcgcagtcgctggcgttgcgtcatttccgccatttatttattcaacaacagtccgaaaatcgcagcagcaaggccgctgtccgtctgcctggcgtgttgtgttaccaggtcgataacctttcgcaagcagcgttggtcagtcatattcagcacatcaataaactcaagaccacgttcgagcatatcgtcacggttgaatcagaactccccaccgcggcacgttttgaatgggtgcatcgtcatttgccggggctgatcacccttaatgcttaccgcacgctcaccgttctgcacgaccccgccactttacgctttggttgggctaataaacatatcattaagaatttacatcgtgatgaagtcctggcacagctggaaaaaagcctgaaatcaccacgcagtgtcgcaccgtggacgcgcgaggagtggcaaagaaaactggagcgagagtatcaggatatcgctgccctgccacagaacgcgaagttaaaaatcaaacgtccggtgaaggtgcagccgattgcccgcgtctggtacaaaggagatcaaaaacaagtccaacacgcctgccctacaccactgattgcactgattaatcgggataatggcgcgggcgtgccggacgttggtgagttgttaaattacgatgccgacaatgtgcagcaccgttataaacctcaggcgcagccgcttcgtttgatcattccacggctgcacctgtatgttgcagattaacgcccggctttcatactgccgaccatctgttctggccgtacccagctgtcaaactcggcttcgctaagataccccagcgcaagggccgcagcttttaaggtcagcccttctttatgcgcttttttggcgatctcggcggctttgtcataaccaatgtgggtgttaagcgcagtcaccagcatcagcgattcattgagtaattgattgattcgctcacgattcggttcaatacccactgcgcagtgtttgttaaaactttccatgccatctgccagcaagcgcaccgattgcaggaaattgtggatcaccattggacggaagacgttcagttcaaagttaccggaagcgccccccatgttgatcgccacgtcgttccccatcacctgacagcagagcatggttaatgcctcacactgtgttgggttcactttccccggcatgattgagctgcccggctcattttccgggattgagatttcaccaattccgcagcgcgggccagaggccagccagcggacatcattggcgattttcatcagtgacgcagccaaccctttcaacgcgccgtgcgcctgaaccagggcatcacaggtcgccagcgcttcaaatttgttcggcgcggtaacaaacggtgcacaggtaatgactgccagttcatctgctacgcgacgcgcatactccggatgggtatttagtccagtacccaccgctgtaccgccaagagccagttccgctacgtgaggcaggctgtattcgatatgtttgagattatgctcgagcatcgctatccagccggaaatctcctgccccagcgttaacggcgtggcatcctgcaagtgagtacgaccaattttgacgatatcggcaaaagcacgggatttctcattcagtgtctgtgtcagggttttaagctgaggaatgagttgcttgcgcagcgccagcagcgccgcaacgtgcatcgccgtcggaaagacatcgttggaactttggcttttgttcacgtcgtcgttagggtgaactttacgttccatcccgcgcacaccgccgagtaattcactggcccggttagccagcacttcgttcatgttcatgttactttgcgtgccggagccggtctgccagatagccagcgggaattcgtcgtcatgctgtcctgccagtacttcatccgccgcctgacgaatggcgctcgctttctcttcagacaacaagcctaaatcttcattaacttttgccgctgcacgcttggttagcgccagcgcatgaatcagtgaggtgggcattttctccgtcgaaatgcggaaatgctccagtgagcgttgagtttgtgcgccccacagcttatctgccgggacatcaatcgcccccatcgaatctttttcgctgcgtactgtattcatgacctgctcctcacctgattaattttttctttctgttttgctttcgttaagcaacttttagctcacttattatttaccatttgataacaaatgtttggtctttcgtgccatgtaaaaaaaccgccccgaagggcggctctgtttatttcacacagcgggtgcattgtgtgagttgtatctgctggaagaagtcatttcctttatcatccacaaggataaacgccgggaaatcttccacttcaattttccagatggcttccattcccagttccggatattcaacacattccaggctcttaatacttccctgcgccaatacagcggccggaccaccgatactgccaaggtagaagccgccgtgttttttacaggcatccgtcacctgctggctgcggttgcctttcgccagcatgatcatacttccgccctgcgcttgcagttgatcgacataagaatccatccgtccggcggtcgttgggccaagagaaccggaggcataaccttccggcgttttggccggacccgcgtagtaaatcggatgatctttgatgtactgcggcagcccttcaccgttatccatccgctctttcagtttggcgtgagcaatatcacgaccgacgataatcgtgccgttaagcgataagcgtgtagaaacgggatactgcgacaactgtgcgaggatctctttcatcggacggttaaggtcaacgcgcaccgcttcgccttctcccgctttgcgcagctcttccgggatatatttgcctggattatgttccagtttttcgatccagatcccctgacggttgatcttcgctttgatattacggtcagcagagcaggagacgcccataccgaccgggcaggatgcgccgtgacgtggcaggcgaatcacgcggatgtcgtgagcgaagtatttaccaccaaactgcgcacccagaccaagattttgcgcttcgatcagcaattctttttccagttccacatcgcggaacgcctgaccgtgctcattcccttccgttggcagttcatcatagtatttcgcggaagccagtttcaccgttttaaggttcgtttctgcagaagttccaccaataacgaacgcaatatgatacggaggacaggccgccgtacccagcgtgcgcatcttctcaaccaggtaatttttcagtttccccggcgtcagtaacgctttggtttcctgatagagatacgtcttgtttgccgaaccaccacctttggcgatacagaggaatttgtattcgtcgccatcaacggcataaagatcgatctgcgctggcagattggtgccggtattcacttctttatacatatccagcggcgcgttttgcgagtagcgcagattatcttcgatataagtgttatagacaccgcgcgccagcgccgcttcatcaccaccaccggtccatacacgctgcccttttttaccaacaataatcgcggtgccggtatcctgacaggttggcagaacgcctttcgccgcgatgtcggagttacgcaggaattgcagcgccacatatttatcattttcgctggcctccgggtcacgcagaatgtcggccacctgttgttggtgcgccggacgcagcatgaacgacgcatcatgaaacgcctggcgcgccaacagagttaacgcttcgggtgcgactttcaaaatctcctgcccttcaaattcagatacgctaacgtgttcgctggttagcaggtaatactcagtatcatcttttttgagtggaaaaggagcctgataatgaaagggtttgtttgacattgttctctcacttactgcctggtttggttatgctctgggcgggtgttccgttgccctgttaaaagcgagtaacaatatcctacacacttttttaacaaaaactgagactagtacgactttttgcggctccaggttacttcccgtaggattcttgctttaatagtgggattaatttccacattaaaacagggattgatcatgcaaaaactcattaactcagtgcaaaactatgcctggggcagcaaaacggcgttgactgaactttatggtatggaaaatccgtccagccagccgatggccgagctgtggatgggcgcacatccgaaaagcagttcacgagtgcagaatgccgccggagatatcgtttcactgcgtgatgtgattgagagtgataaatcgactctgctcggagaggccgttgccaaacgctttggcgaactgcctttcctgttcaaagtattatgcgcagcacagccactctccattcaggttcatccaaacaaacacaattctgaaatcggttttgccaaagaaaatgccgcaggtatcccgatggatgccgccgagcgtaactataaagatcctaaccacaagccggagctggtttttgcgctgacgcctttccttgcgatgaacgcgtttcgtgaattttccgagattgtctccctactccagccggtcgcaggtgcacatccggcgattgctcactttttacaacagcctgatgccgaacgtttaagcgaactgttcgccagcctgttgaatatgcagggtgaagaaaaatcccgcgcgctggcgattttaaaatcggccctcgatagccagcagggtgaaccgtggcaaacgattcgtttaatttctgaattttacccggaagacagcggtctgttctccccgctattgctgaatgtggtgaaattgaaccctggcgaagcgatgttcctgttcgctgaaacaccgcacgcttacctgcaaggcgtggcgctggaagtgatggcaaactccgataacgtgctgcgtgcgggtctgacgcctaaatacattgatattccggaactggttgccaatgtgaaattcgaagccaaaccggctaaccagttgttgacccagccggtgaaacaaggtgcagaactggacttcccgattccagtggatgattttgccttctcgctgcatgaccttagtgataaagaaaccaccattagccagcagagtgccgccattttgttctgcgtcgaaggcgatgcaacgttgtggaaaggttctcagcagttacagcttaaaccgggtgaatcagcgtttattgccgccaacgaatcaccggtgactgtcaaaggccacggccgtttagcgcgtgtttacaacaagctgtaagagcttactgaaaaaattaacatctcttgctaagcttattaaaggcttataacaccttcaggcggccagtccgcctgatttcattttatggataatcattatgaataaatcgctggtagcggtaggcgtcattgttgcgctaggcgtagtctggacaggcggcgcatggtatacaggcaagaagattgaaacccatctcgaagacatggtcgcgcaggcgaacgcgcaactcaaactgacagctcctgaatccaacctggaagtgagttatcaaaactatcatcgcggcgtattcagcagccagttgcaactgttggtgaaacccattgccgggaaagaaaatccgtggattaaaagcggtcagagcgtcatcttcaacgaatcggttgatcatggtcccttcccgcttgcccagcttaaaaaactgaacctgatcccgtcgatggcatcaattcaaaccacgctggttaataacgaagtaagcaaaccactgtttgatatggcaaaaggtgaaacgccttttgagattaactcgcgcattggttacagcggtgattccagttccgatatttcgctcaagccactgaattacgagcaaaaggatgaaaaagtcgcctttagcggcggcgagttccagttaaatgctgacagagacggcaaagccatctccctttccggggaggcgcaaagtggtcggatagacgcagttaacgaatacaaccagaaagtgcagttgacctttaataatctgaaaaccgacggttccagcacgctggcaagttttggtgagcgtgtaggaaatcaaaaactgtcactggaaaaaatgaccatttcagtggaaggcaaagaactggcactgctggaaggcatggagatcagcggtaaatcggatctggtcaatgacggtaaaacgatcaatagccaactggattactcgctaaacagcctgaaggtacagaatcaggatctgggcagcggcaagctgactttaaaagtcggccagattgatggtgaagcctggcatcagtttagccagcaatataacgcgcaaactcaggcgctgctggcacagccagaaattgccaacaaccccgaactttatcaggagaaagtgacggaagccttctttagcgccctgccgctgatgctgaaaggcgatccggtgattactatcgcgccgctaagctggaaaaacagtcagggtgaaagtgccctgaatctgtcgctgttcctgaaagatccggcaacgactaaagaagcgccgcaaacgctggcgcaggaagtagatcgttcggttaaatctctggatgcgaaactgaccattccggtggatatggcaactgagtttatgactcaggtagcgaagctggaaggttatcaggaagatcaagcgaaaaaactggcgaaacagcaagttgaaggtgcatcagcaatggggcagatgttccgtctgaccaccttgcaggacaataccatcaccaccagcctgcaatatgctaacggtcagataacgttaaatgggcagaaaatgtcgttagaagattttgttggcatgtttgcgatgccagctcttaacgttccggctgtaccggcaattccgcagcagtaattcacggccaaaacgccggagaattttcactccggcgttttcatctgaaaacaaaccagagattgcctgatgcgctacgcttatcaggcctaccttttcctgcaacactttgaatttatgagtttttgtaggctggataaggcgtttacgccgcatccggcataaaaaacgcgcactttgtcaacaatctgaaacgccggagatttttctctccggcgttattttttacttcagcataaagtcatactgaatactcattttcacatcccagtaattcaggcgatcgcccagcgtactgccatcgcgcttttcccgccctttatcggcagcaagaaagaaattcatcccttgtaacggcccttcgctgacccgatagttcataccacctaagatacccgtgccttcaatccgcacatctcgtttactggattcatagccgcgagtcacaatcggtgcaaatgtcagcgtaaattgcggcgttaaacgatagttgacgcccaattgccaggactgcattccttcacggttacgatcaagacttaatgaaaagggatagccaatgtcggtatccaccacggcaccattcattgcatggcgcaaataaccaccactgccaaatacgcttccccacggcgcattccaggtcaattgtccactaaccaacgccgtttcattgggctggctggtattacgacttaaaccttcgagctgcgcgtaaaagccgagcaactcccctttcaacgtataattcgggtcgagcggtatgcttttctcgagaatactttgtatctgattggaaacatctttctgtaccgatccccccagagaatagcgactggtatcatcatgccaactggcggctaaaaaagaacgtgcgcgatgtttatcgtattttcccgtctggctgttatacaccccttcatcacgaataccggttgttgaatcagtccataaaaatactcgtgaacgccacattccccacagatcaatatttggtgttaaagcccaataacctaatgctccttcagaaactgtcggtaatgtacgttgcgaactgccagccattaacggaatacgataaggtaagctaccataactataatccgtcccgaagcgacctaatttaagcaggctattttcactgggttttatttttactgcccccagggcaaagccaaaacttttatcaccatcaagataccaccgggtactcatatcagcacgagcacctaatttataaacataatacgccccgccttcaacgccaataatattggaataataaccactattgaaatcgagcaatcctccctgtacccatgcgtaaatatctcttcccgcgccagcactgggcttatccgccctgcgcaattcgtttttcagtctgatgcgtagtcccgcttcatcgtcagccagttgcgccgcataagcagaggtaaggccagaggcagccgtcaggcaaataacggccatggccactatttttctcatagttgcacctttgatgttctgattatttttattgaatattaattagtgatatcgctgattaattgctgctgcacttttttacgattatcaatttcaaccacgatttctttgaattttttatccgtgagcggataaaaccagataataacgaatgccagtagcataaatccgcaaggtactaaggcaattgatgtgcggatgcccataataacttccggcgtttgcacctgattggcgatatatccgcttaaccccaaaataaaggcaggaattgaacctccgattgcctgaccgcatttacgggtaaatgagaatagtgaataggtgagcccttcaattcgcacgccggtcaggtattcaccgtattctacggtatcagcttccagcgcccacatcacggtcatggtaacgccctgaccaattgaagcgatggccaacgcaaccaacgccaccggcagtgaccagacggaaacccagaagaacagcagataaccgcaggttcccagcaaagcgccaatcaggaaggtattctttttaccgatcctcgcgaccatccccggcaccagcggtgccgatgccacagtaccaaccaggttttgcaccagtaccagcacagtgaacagcccggtatcatttaacacatagcgcacgtagaacaacgacgaggcgctgaccgcaaaggtcgaaatcagcacacacagcgcaccgatgcacaacataaacagcgggcgattccgtttcagggtttgcagactgatattcaatgacggctgcgcaacgatacgtaccacattctcacgcgtcgatttgaagcagatgaagtaaagcaccattccggcaatcgccagcacaattgtccagaaatggtataccgacaccatctcttccgggctggagttcttaatgctcggtcctatcagaaatgccaggcagacaaaggtcaatgaagcggcaatcccacgagccgcgcccagacgggcgcgggattgtggttgttgggtcatcgcggtagcaagtgaaccataaggaatattcaccaggctgtagcaaagcccgaggcccatgtaggtcaaatatgcatacaccactttgctaccatggctccagtcggtcggcacccagaataccagcacgctgaagatcattaacggcgcagtaccgaagagtaaaaacgggcggaattttccccagcgggtattcacactgtccaccactcgtccggcaaagacgtcggcgaaggcatcgaatacccgcaccagtaacagcatggtgcccgccgcagcggcaccgacgccagcgacgtcggtgtagtaactcaacaggaagagcgcccccattgcgaaggcgaagttattggcgacgtcaccgaggctgtagccgacgatggtgcgccaggagagttgttgattcattgtttgcctccctgctgcggtttttcaccgaagttcatgccagtccagcgtttttgcagcagaaaagccgccgacttcggtttgcggtcgcgagtgaagatccctttcttgttaccgccaacgcgcaatatgccttgcgaggtcgcaaaatcggcgaaattccatacctgttcaccgacgacggcgctgacgcgatcaaagacgcggtgatacatatccagccatgcacactgatactcttcactccacatgtcggtgtacattgagtgcagcccggctaacgtatccacgccgtattcggtgatgataatcggctgatgcagtttctcctgccaggccagaagttctttttccagtaccttctctgccgtttccaaatcgccgctttggacataccatccgtaataacggttcaggcacagcacatcaaagagatcgctgatggtatcggtgtgagcgtcgcagaacattacattgacgcaggtgatcggacgcgtcgggtcgagtttacgcgttgcttccgccagtggcgcgaaatattcccgtgcaccttgcggacgggtatccggttcgttggcaatactccacatcaccacgcttgggtggtttttgtcacgcgctatcagctctttaatcgcctgtaagtgcgcttgctgagtttccccgttgactgcctcttcgctgtacagttctttcggcttgttgcccgcttcgaaaccaatgcctaaagagaggttaaagccgacagcagcagtttcatcaatcaccacgatgccatgttcatctgcccagtcgagcatctcttcagcgtaagggtaatgcgaggtacggtaggagttggccccaatccagtccattaatgcgtggtcgtgcaccatcagcacgttatcgaatcctttgccacgcaagtccgcatcttcatgacgaccaaagccagtaaagtagaacggtttgtggttaatcaggaactgttcgcccttcactgccactgaccggatgccgacgcgaagcgggtagatatcacactctgtctggcttttggctgtgacgcacagttcatagagataaccttcacccggttgccagaggtgcggattcaccacttgcaaagtcccgctagtgccttgtccagttgcaaccacctgttgatccgcatcacgcagttcaacgctgacatcaccattggccaccacctgccagtcaacagacgcgtggttacagtcttgcgcgacatgcgtcaccacggtgatatcgtccacccaggtgttcggcgtggtgtaaagcattacgctgcgatggatcccggcatagttaaagaaatcatggaagtaagactgctttttcttgccgttttcgtcggtaatcaccattcccggcgggatagtctgccagttcagttcgttgttcacacaaacggtgatacgtacacttttcccggcaataacatacggcgtgacatcggcttcaaatggcgtatagccgccctgatgctccatcacttcctgattattgacccacactttgccgtaatgagtgaccgcatcgaaacgcagcacgatacgctggcctgcccaacctttcggtataaagacttcgcgctgataccagacgttgcccgcataattacgaatatctgcatcggcgaactgatcgttaaaactgcctggaacagcaattgcccggctttcttgtaacgcgctttcccaccaacgctgatcaattccacagttttcgcgatccagactgaatgcccacaggccgtcgagttttttgatttcacgggttggggtttctacaggacgtaacataagggactcctcattaagataataatactggtcaacctttaatctgattagttaaccaattctgtgttgcacacagttatctgtgagaaacccatggaagagaaatggaaataaaaagaactgacaccgcgatcaaaaaaccaaaaactgcaatacccacagcgtgatatagatcgcattaatctttaaaacagcgttgacagaagccataaaataagcaaccgaacgttcgttcgagcgtattgggaacgataaactctcatgacatatggctacagtgaatattttggggggaattctccgaagccgggaaggataatttttgcacagagaaattacgatatgaaacgcgggcacagttatcaccagcccgccgaaaaagagagagaatcaggatgcggttaagataccgccaatcatcgcgcgtaatccctgagcaaacgacgcttcacgcgccaggtcttccgcttcgatatcggccagtacaccgtaggtcagatccagcagtaaacgtgaagtcattgccgtgttgatgtctgggcttatctcgcctttttgctgggcatcacgcatccgctgggcaacaaattccgtgatcgtcatatgcttatttttaagcatggcggcgacctgtgggttacgcatcccttccgccataatttcaaccaccagcgcccgttgtccaaaggcttcatgggtgagagagacaatggactcgaccatatagtcaacgaaatgaatcccttcaatcggttcccggaaacgggccagcgccctctcctggtcctgtaagataatcgcctgaatcaaggcttctttggagatgaaatggtgatagagcgtcccgggactaatggcgcaagatttacagatggctttcatcgaggcactgtgaaatccattttctgaaaaaatctctctggcagcattgaggatccgggtccgtgtcggttgtgcttcagtctgcatgttatccatcattaaaccattatagttagcgtgaataactagtttaccgcgttgtcaggtgagcgcctatcattgctgttgaatagtgcgaaggcacactctattcgtatacttttcactctgaaattggttaaccaatagccgtgatttggctgccagttatttagcagagacgttgatgagtttatcccggtaaacaacacgcacggttgtttaccggtccgttagtgtattaattgagctcctgtaccccaccaccggagacggtgagaatttgtccgcttacccagctcgcagcaggcgagcaaaggaacagcgctgcgttagcaatatcttgcggttggcccagacgtctgatcggcgtgtgctgtaacattttttgttcaatttctggtgtaataacggatttcagggcatcggttaatattgcccccggcgcaatgccatttacccgaatatttttttcacccaggtcaaacgccatatttctgaccagatgactggccgcagctttagatgatgcataggaagtcatgtttatatttttattttctgccgccatagaagtgatggtcagaataacgccaccgccatttttttccatttctggcgcaacaagttgtgacagatggaaaaaagaaaacacattcagttcataagcacggcgaaaatccgccattggcatatcaaacggtttaggtccaccgccaccggcgttgttaaccagaatatcaactttacccagcttactgatagcaaagtctgccagtgcagagagttcctgttcggaagtaatatcacaacggcaggcaaatgcctgaccacccagttgttgaatttcgtctacaacatggttagctgcgtcggcgttaatatcactgaccaccacagatgcgccagctgtcgcgaatgtaatggcgatttctttaccaatacctgcacccgcacctgtgatgatggcgcattttccgtcgagtctcaggttgtcagaattaaacacataaacctcctgtgaacttcagtaaaaataaaaggcaccgcctgtgtgccacatttttatcattaaccttgaggaaaggacactaccaggtatagcagataaagagaggattatttcgccgcaatgagccgggcgggaataataagattgcgtgaatgcgtctcttcatgggtgattttttgcatcatgcgatccgcaagtgtgataccaagttcccgcgctggcgtgctggcccaggtaacaggtatatcatcaagggtggttggtgtcgcatcggtaaatgccgccagcgaaacctgttgctcaaagtaacgatcgactccgctttccccgctttgccgccctgctttcagcaaaccaaaccatgcccccatcgcaatagtttcgttatagcaaaccacggcactgatggtcgggttatggcgtaaaagcgccgtgatagcttccgcggcttgcttctggctggaagtgcactccagcacccaattgctgtgaaacggcaggccaaattttagtagagttgcacaatagccccccacccgttctgcacgggttaatgaggaactttgccctcccagccaggcgatccgctgatgcccattgcgaatgagatgctccgtcaacaactgtgcagcctgcatgttgtccgggcgaaccgtatcaacatcatcaagataactggcacgggaagcgaaaatcaccgggatacctttttcttctgccatccgtcgcaggtcatcgctgcttcctgcagccccggcaattaccacaccatcgacaccctgattcagtaacagtgaaaaccgctgtgccagctgctcgccgtctttaccgccgtgaagcaaaaaaaccatccgtccctgcgcttccagagcttccgtcaatccggccgtcaattcggcgtaaaacggcgcagataaatcacggacgatcaaaccaatgacgccgctttgcccgccgcgcagcgccgacgcctggcgattgcgcacaaatcccagctcttcaatggcggcgttaacgcgttctcctgtggcggtagagattcgccctttgccactaagcaccagcgaaacggtacttaccgacacgcccgcagccagcgcaacatcatgaatggttatttttttggcggtagccatgcagatgacctactccctgattatgtgacaggtaaaacgttttaccttttatttatcttatacccgctattatcgttgcgtaatgtgatttatgcctcactaaaatttgataaaacgttttatcttctcgcgcaatttactgaatccagattgttctctacgaggagtcgttttatgacggcgaaaacagcaccgaaagtcacgctgtgggagttcttccagcagttaggcaaaaccttcatgttacccgtggcattattgtcgttctgcggcattatgctcggcattggtagttcccttagtagccacgatgtcatcaccctgctcccggtcctgggcaaccccgtgttgcaggctatctttacctggatgagtaagattggctcgtttgcttttagtttcctgccagtcatgttctgtatcgccatcccgctgggtctggcacgcgaaaacaaaggcgtagcggcattcgctggcttcgtcggttatgcggtaatgaacctcgcggtaaacttctggttaaccaataaaggcattctgccaaccacagacgccgccgttctgaaagccaataacatacagagcattcttgggatccagtcgatcgataccgggatcctcggtgcggtgatcgccggtattatcgtctggatgctgcatgagcgattccataatatccgcctgccggatgcgctggcattcttcggcggtacgcgctttgtaccaattatctcctcgctggtgatgggccttgtcggcctggtgattccattagtctggccgattttcgccatgggtattagcggcttaggccatatgatcaatagcgcgggtgatctcggaccgatgctgtttggtaccggtgaacgtctgctgttgccgtttggtctgcatcacattctggtggcattaattcgctttaccgacgcaggtggcacgcaggaagtctgcggtcaaaccgtcagcggcgcactgaccatcttccaggcgcaattgagttgcccgaccactcacggtttttctgaaagcgccacgcgtttcctttcgcaaggcaaaatgcctgcgtttctcggcggtctgccaggtgcagcgttagctatgtatcactgcgcgcgcccggaaaatcgccataaaattaaaggtctgctgatttctggcctgatcgcctgtgtcgttggcggcactaccgaaccgctggaattcctgttcctgttcgtagcgccagttctgtatgtcatccacgcgctgttaaccggcctcggcttcaccgtcatgtctgtgctcggcgtcaccatcggtaataccgacggtaatatcatcgacttcgtggtgttcggtattttgcatggtctgtcaaccaagtggtacatggtgccagtggtggcggcaatctggtttgtcgtttactacatcatcttccgtttcgctatcacccgcttcaatctgaaaaccccggggcgcgatagcgaagtggccagttcaatcgaaaaagccgttgccggtgcgccgggtaaatcaggctacaacgttccggcaatcctcgaagcattaggcggtgccgacaatattgtcagcctcgataactgcattacccgtctgcgtttgtctgtgaaagatatgtcgcttgttaatgtgcaggcactgaaggacaatcgggcaattggcgtagtacaacttaatcaacataacctgcaggttgttatcgggccacaagttcagtcagtaaaagatgaaatggccggtctgatgcatactgtccaggcataaggataagatatgttcgatttttcaaaggtcgtggatcgtcatggcacatggtgcacgcagtgggattatgtcgctgaccgtttcggcactgctgacctgttaccgttcacgatttcagacatggattttgccactgccccctgcattatcgaggcgctgaatcagcgcctgatgcacggcgtatttggctacagccgctggaaaaacgatgagtttctcgcggctattgcccactggttttccacccagcattacaccgcaattgatacgcagtcggtggtgtatgggccttctgttatctatatggtttcagaactgattcgtcagtggtctgaaacaggtgaaggcgtggtgatccacacacccgcctatgacgcattttacaaggccattgaaggtaaccagcgcacagtaatgcccgttgctttagagaagcaggctgacggttggttttgcgatatgggcaagctggaagccgtgttggcgaaaccagaatgtaaaattatgctcctgtgtagcccacagaatcctaccgggaaagtgtggacgtgcgatgagctggagatcatggctgacctgtgcgagcgtcatggtgtgcgggttatttccgatgaaatccatatggatatggtctggggcgagcagccgcatattccctggagtaatgtggcgcggggagactgggcgttgctgacgtcgggatcgaaaagtttcaatattcccgcgctgaccggtgcttatgggattatagaaaatagcagtagccgcgatgcctatttatcggcactgaaaggccgtgatgggctttcttccccttcggtactggcgttaactgcccatatcgccgcctatcagcaaggcgcgccgtggctggatgccttacgcatctatctgaaagataatctgacgtatatcgcagataaaatgaacgccgcgtttcctgaactcaactggcagatcccgcaatccacttatctggcctggcttgatttacgtccgttaaatattgacgacaacgcgttgcaaaaagcacttatcgagcaagagaaggtcgcgatcatgccggggtatacctacggtgaagaaggtcgtggttttgtccgactcaatgccggctgcccacgttcgaaactggaaaaaggtgtggctggattaattaacgccatccgcgctgttcgttaaccccaattgcgcaacgtaaaaaatcgttgcgcaatcgtggatttttaccctgctttgtttttataatggtgcgcacttttatatccagaaaaagagtgcgaccatgattgataccaccctgccattaactgatatccatcgccaccttgatggcaacattcgtccccagaccattcttgaacttggccgccagtataatatctcgcttcctgcacaatccctggaaacactgattccccacgttcaggtcattgccaacgaacccgatctggtgagctttctgaccaaacttgactggggcgttaaagttctcgcctctcttgatgcctgccgccgcgtggcatttgaaaacattgaagatgcagcccgtcacggcctgcactatgtcgagctgcgtttttcaccaggctacatggcaatggcacatcagctgcctgtagcgggtgttgtcgaagcggtgatcgatggcgtacgtgaaggttgccgcacctttggtgtgcaggcgaagcttatcggcattatgagccgaaccttcggcgaagccgcctgtcagcaagagctggaggcctttttagcccaccgtgaccagattaccgcacttgatttagccggtgatgaacttggtttcccgggaagtctgttcctttctcacttcaaccgcgcgcgtgatgcgggctggcatattaccgtccatgcaggcgaagctgccgggccggaaagcatctggcaggcgattcgtgaactgggtgcggagcgtattggacatggcgtaaaagccattgaagatcgggcgctgatggattttctcgccgagcaacaaattggtattgaatcctgtctgacctccaatattcagaccagcaccgtagcagagctggctgcacatccgctgaaaacgttccttgagcatggcattcgtgccagcattaacactgacgatcccggcgtacagggagtggatatcattcacgaatataccgttgccgcgccagctgctgggttatcccgcgagcaaatccgccaggcacagattaatggtctggaaatggctttcctcagcgctgaggaaaaacgcgcactgcgagaaaaagtcgccgcgaagtaacaaaatggatggtgcaaatgcaccatccatttttcatgcaaggcacaaagtcgcgcgatgtttggcggattcgatgcccagctcaatcaactccattacctggattgcctggcttgccggaaccggattttcaccatcgccatttaacgcatcacgaatagccgcatagtaagccggataattcccaggcaccgtcaacagcgtttcttcgacacgttcctcaccttccacgcgggtaagtacgccatcacgcatatcgtagccccagtcttcctgcggtagacgctcgccatttttcagacgttcttcctgtggatcgaggccatatttcacataactgcctcgggatccatgcacgatataccgtgctgactcagcggctgccagcatggtaccgtgtaaaatgactcgccgctgtggataggacaagatggcgtggaaataatcggtcgactgcgctccgggccgtaactgtgccaaatctaccgtcatgctgaccggtaaaccaaaaagcgtaatggcctgatcaagaagatgtggtgctaaatcgtaccagataccgctgcctgggccgccctgttcacgccaacgatcgcgcacctgcggacggaagcggtcaaaatgagactcaaagtaagcaacttcacccagcacgccttccgcgagtaaaccttttagcgtcaagaaatcgctatcccagcgacggttatggaatacagacagcacacgccccaggctttttgccagcgcatccagctctcgcgcttgtgacagtgtcacggtaaagggtttatcaacgaccacatgtttacccgcctcaagcgccgctttggctaacgggaaatgggtatcgttgggtgtaggaatgacaatcaggtctatgttgggatcgttaaacagatgcttcggctcagagacaaccgtaaccgttggccagtcggcttttacttttgtttcatcactgctggagattaccgccagttccagcccgggcgtgcccgcaatcaggggcgcatggaaggttttgctcgcataaccatacccaatcaacccaacacggatgttgtcgctcatgtcattgcctctcattgaagtatgatggctatttgacactatcctttacccacgctcaacagtttaataacctgccagcaataagggatgttgtttaacttaagtcaaaaaaatagcgaattttccaacgacaaaagctaaatatcgcaaaaacctcagtaaaaatcttgctggagctattattgctaagtaacatttaccccctgaagttaatggatcaatcaagagagatgtgggctgtaatgaatcgtcttattgaattaacaggttggatcgttcttgtcgtttcagtcattcttcttggcgtggcgagtcacattgacaactatcagccacctgaacagagtgcttcggtacaacacaagtaagctctgtacttgtggagcgacatgctgcccgtccgggtgcatgttttcacttgtcggatattaaaccaggaatttattatcttgttcgatgttgttggtgattgtcagggatagtaaagcgcgttactcttttcagagcagtttttcatccctgaatatttgccatcagcgcattcttattattgtaataacacaagcgttcacttttggtgaaattttatcatcactaataatacctacccctttggtattaattattttatggaccttttatgactgttcaggactacttattaaaatttcgcaaaatcagttcactcgaaagtctggaaaaactctacgaccatcttaattacaccctgacggacgatcaggaactgatcaatatgtatcgtgctgccgatcaccgtcgcgcagagctggtttctggcgggcgtttgtttgacctcggccaggtaccgaagtccgtctggcactatgtccaataaagaaagtagcgatcggttataaaagccttataataacgcccctaaaattagatttgcctgtttgcgtcgctattctggagaacctatgaccaccacaacgccacaacgtattggaggctggttgcttggcccgttggcctggcttttagtcgctctgttgagtacgacgctggcgttgttgctgtataccgctgcgttatcttctccgcaaacatttcaaacgctcggcggacaagcactgacgacacaaatcttatagggcgtttcttttattaccgctatcgccttgtggtattacacactgtggttgaccatcgctttctttaaacgtcggcgttgtgttcctaaacactatattatctggctgcttatttccgtattgctggcagtaaaagcattcgctttttcacccgtggaagatggcatagccgttcgccagttgctgtttactttgttggcaaccgcattgatcgtcccctatttcaaacgctcgtcgcgggtaaaagcgacgtttgtgaatccgtaataaccttacagttaacctgttgtcgcctgctctggattaacggataataggcggcttttttatttcaggccgaaaaatgactgactacctgttactgtttgtcggaactgtactggtcaataactttgtactggtcaagtttctcggtctctgtccgtttatgggggtttccaaaaaactggaaaccgcgatgggcatggggctggcaacaacgtttgtgatgacgctggcgtctatttgcgcctggcttatcgatacgtggattttgatcccacttaatctgatttacctgcgcaccctggcatttattctggtgattgctgtggtcgtgcagttcaccgagatggtggtgcgcaaaaccagcccggtgctttaccgtctgctggggatttttttgccgcttatcaccaccaactgtgcagtgctcggcgtggcgttgctgaatatcaatctcgggcacaatttcttgcagtcggcgctgtacggtttttccgccgctgtcggtttctcgctggtgatggtgctcttcgccgccatccgcgaacgccttgctgtggctgatgtcccggcaccttttcgcggtaatgccattgcgttaattaccgcaggtcttatgtctctggcctttatgggctttagtggtttggtgaagttgtaatgaatgctatctggattgccgttgccgccgtgagcctgctgggcctggcgtttggcgccattctgggttatgcctcccgccgttttgcggtggaagacgatccggtcgttgagaaaattgacgaaatcttaccgcagagccagtgtggtcagtgcggttatcccggctgtcgcccctacgcggaagccatcagctgtaacggtgaaaaaatcaaccgttgcgccccaggtggcgaagctgtgatgctaaaaattgccgagttgcttaatgtcgagccgcagccgctggatggcgaagcgcaagagataacgcctgcgcggatggtggcggttattgatgaaaataactgtattggctgcactaaatgtattcaggcgtgtccggtagacgccatcgttggcgctacccgtgccatgcatacggtaatgagtgatctctgtacgggctgcaatttatgtgttgatccgtgcccgacgcactgcatctcgttgcaaccggtcgcagaaacacctgactcctggaaatgggatctgaacaccattcccgtgcgtatcattcccgtggaacaccatgcttaagttattctctgcattcagaaaaaataaaatctgggatttcaacggcggcatccatccaccggagatgaaaacccagtccaacggtacacccctgcgccaggtacccctggcgcagcgttttgttattccactgaaacagcatattggcgctgaaggtgagttgtgcgttagcgtcggcgataaagtattgcgcggccagccgcttacccgtggtcgcggcaaaatgctgcctgttcacgcgcccacctcgggtaccgttacggctattgcgccccactctacggctcatccttcagctttagctgaattaagcgtgattattgatgccgatggtgaagactgctggatcccgcgcgacggctgggccgattatcgcactcgcagtcgcgaagagttaatcgagcgcatacatcagtttggtgttgccgggctgggcggtgcaggattcccgacaggcgttaaattgcagggtggcggagataagattgaaacgttgattatcaacgcggctgagtgcgagccgtacattaccgccgatgaccgtttgatgcaggattgcgcggctcaggtcgtagagggtattcgcattcttgcgcatattctgcagccacgcgaaattcttatcggcattgaagataacaaaccgcaggcgatttccatgctgcgcgcggtgctggcggactctaacgatatttctctgcgggtgattccaaccaaatatccttctggcggtgctaaacaattaacctacattctgaccgggaagcaggttccacatggcgggcgttcatccgatatcggcgtattaatgcaaaacgtcggcactgcttatgcagtgaaacgtgccgttattgatggcgagccgattaccgagcgtgttgtaaccctgactggcgaagcaatcgctcgcccgggcaacgtctgggcacggctggggacgccagtgcgtcatttattgaatgatgccggattctgcccctctgccgatcaaatggtgattatgggtggcccgctaatgggctttaccttgccatggctggatgtcccggtcgtaaagattaccaactgtctgttggctccctctgccaatgaacttggcgaaccacaggaagaacaaagctgcatccggtgtagcgcctgtgctgacgcctgccctgcggatcttttgccgcaacagttgtactggttcagcaaaggtcagcaacacgataaagctaccacgcataacattgctgattgcattgaatgtggggcttgcgcgtgggtttgcccgagcaatattcccctggtgcaatatttccgtcaggaaaaagctgaaattgcggctattcgtcaggaagaaaagcgcgccgcagaagccaaagcgcgtttcgaagcgcgccaggctcgtctggagcgcgaaaaagcggctcgccttgaacgacataagagcgcagccgttcaacctgcagccaaagataaagatgcgattgctgccgctctggcgcgggtgaaagagaaacaggcccaggctacacagcctattgtgattaaagcgggcgaacgcccggataacagtgcaattattgcagcacgggaagcccgtaaagcgcaagccagagcgaaacaggcagaactgcagcaaactaacgacgcagcaaccgttgctgatccacgtaaaactgccgttgaagcagctatcgcccgcgccaaagcgcgcaagctggaacagcaacaggctaatgcggaaccagaagaacaggtcgatccgcgcaaagccgccgtcgaagccgctattgcccgtgccaaagcacgcaagctggaacagcaacaggctaatgccgagccagaacaacaggtcgatccgcgcaaagccgccgtcgaagccgctattgcccgagccaaagcgcgcaaacgggaacagcaaccggctaatgcggagccagaagaacaggttgatccgcgcaaagctgccgtcgaagcggctattgcacgcgccaaagcacgcaagctggaacagcaacaggctaatgcggtaccagaagaacaggttgatccgcgcaaagcggcagttgccgcggctattgcccgcgctcaggccaaaaaagccgcccagcagaaggttgtaaacgaggactaaatggtattcagaatagctagctccccttatacccataaccagcgccagacatcgcgcattatgctgttggtgttgctcgcagccgtgccaggaatcgcagcgcaactgtggttttttggttggggtactctcgttcagatcctgttggcatcggttagtgctctgttagccgaagctctcgtactcaaactacgcaagcagtcggtagccgcaacgttgaaagataactcagcattgctgacaggcttattgctggcggtaagtattccccccctcgcgccatggtggatggtcgtgctgggtacggtgtttgcggtgatcatcgctaaacagttgtatggcggtctgggacaaaacccgtttaatccggcaatgattggttatgtggtcttactgatctccttccccgtgcagatgaccagctggttaccgccacatgaaattgcggtcaacatccctggttttatcgacgccatccaggttatttttagcggtcataccgccagtggtggtgatatgaacacactacgcttaggtattgatggcattagtcaggcgacaccgctggatacatttaaaacctctgtccgtgccggtcattcggttgaacagattatgcaatatccgatctacagcggtattctggcgggcgctggttggcaatgggtaaatctcgcctggctggctggcggcgtatggttgctatggcagaaagcgattcgctggcatattcccctcagcttcttagtaacgctggcgttatgcgcaatgttgggctggttgttctcaccagaaacactggcagcaccgcaaattcatctgctgtctgaagcgaccatgctcggcgcattctttattttgactgacccggttaccgcttctacgaccaatcgtggtcgtcttattttcggcgcgcttgcgggcttattagtctggttgatccgcagtttcggcggctatcctgacggcgtggcttttgccgtcctgctggcgaacatcacggttcctctgatcgattactacacgcgtccgcgcgtctacggccatcgcaaagggtaaaccatgctgaaaactatccgaaaacacggcattacgttggcgctatttgcagcgggttcaacagggttaactgcggccatcaaccagatgaccaaaacgacgattgctgaacaggccagtctgcaacaaaaggcgttatttgatcaggtgctgccagccgaacgctataacaatgcgctggcacagagttgctatctggtaactgcgccagagttaggtaaaggtgagcatcgggtttacatcgccaaacaggatgacaaaccggtagccgccgttctggaagcaaccgcgccagatggctattccggtgcgattcagctgctggtgggagccgattttaacggcacggtacttggcacgcgcgtgacagagcaccacgaaacgccagggcttggcgataaaatcgaactgcgcctttctgactggatcacccattttgcgggtaaaaaaatcagtggtgcagatgatgcgcactgggcggtgaagaaagatggtggtgatttcgaccagttcaccggcgcgacgattactccccgcgcggtggttaatgcggtaaaacgcgccggattgtacgctcagacgttaccggcacaactttctcaacttcctgcctgtggagaataaagcgtgagcgaaattaaagacgttattgttcaggggttgtggaaaaacaactctgcgctggtccagttgctcggcctttgtcctctgttggcggtcacgtccactgccactaacgctctgggtttaggacttgcgactacgctggtactgacgctgaccaacctgaccatttcgacgctgcgtcactggacgccagccgagatccgcattcccatttacgtgatgatcatcgcctcggtggtcagcgctgtacagatgctgatcaacgcctacgcctttggcctgtatcaatcattagggatttttattccgctgattgtcactaactgtatcgttgtgggccgcgctgaagccttcgccgccaaaaaaggtccggcgctttcggcactggacggcttttcaattggtatgggcgcaacctgcgccatgttcgtgctgggttcactacgcgaaattatcggcaatggcacattgtttgacggtgcagatgcgctgttaggtagctgggcaaaagtattacgcgtggagattttccacaccgactcccctttcctgctggcgatgctgccaccaggtgcatttattggcctgggactgatgctggcaggaaaatacctgattgatgaaagaatgaaaaagcgccgtgctgaagcagctgcagaacgtgcattgccaaacggtgaaacagggaatgtctgatgaataaagcaaaacgcctggagatcctcactcgcctgcgtgagaacaatcctcatcccaccaccgagcttaatttcagttcgccttttgaattgctgattgccgtactgctttccgctcaggcgaccgatgtcagtgttaataaggcgacggcgaaactctacccggtggcgaatacgcctgcagcgatgcttgaactgggcgttgaaggggtgaaaacctatatcaaaacgattgggctttataacagcaaagcagaaaatatcatcaaaacctgccgtatcttgctggagcagcataatggcgaggttccggaagatcgtgctgcgcttgaagccctgcccggcgtaggtcgtaaaacagccaacgtcgtattaaacactgcattcggctggccgactattgctgtcgacacgcacattttccgcgtttgtaatcgtactcaatttgcgccggggaaaaacgtcgaacaggtagaagaaaagctactgaaagtggttccagcagagtttaaagtcgactgccaccattggttgatcctgcacgggcgttatacctgcattgcccgcaagccccgctgtggctcttgtattattgaagatctttgtgaatacaaagagaaagttgacatctgaagaaaaggggtaacaccgattaccccattgataacctttctttatcctcttttaaaacatctttttaacgtcaatgatgccattgcttagcgttatcatcaggtaatccgtttgcggataaccaaaaatgcaggttaattgtttttttaatagcgaaattttctattcattcgtgatcaagatcacgatgctgtcgcaatgtaaaaacattgcaagaatcaggttaaaatcatttaaatttacacacgcaacaaatattgacctacaaaacattacactggctatttttcagaaactggactatctcactagtaaaaacgctaaatagcagaacatatcgccgttaagccattacccccctctcagtgcagtgaaaaaatctgccgttacgttttttgaaaaatttaacgctggataacatttcccggaatggttgaattccccgcctcagttatatgtaacagattattacaaaggacttgtctgaaagtgcaagatagtgaacattacctgccgtttcccctcccactataacaattgcgcgtatgttttttatacataacgcgagaaagcacccccgttaatatgggatgtaaaaaaagaggtaaaagtgtccactgcaaaccaaaaaccaactgaaagcgtcagtttgaacgctttcaaacaaccgaaggcgttctatctcatcttctcgattgagttatgggaacgttttggttattacggcctacaaggaattatggctgtttacctggttaaacaactgggtatgtctgaagcggattcaatcacccttttctcttcctttagtgccctggtttatggtctggtcgctatcggcggctggttaggtgacaaggtactgggtactaaacgcgtaattatgctcggcgctattgtgctggcgattggttatgctttggttgcctggtctggtcacgacgccggtatcgtttatatgggtatggcggctattgcggtcggtaacggcctgtttaaagctaacccgtcttctctgctttctacatgctatgagaaaaacgacccgcgtctggacggtgcattcaccatgtactacatgtccgtcaacatcggctctttcttctctatgattgctacgccgtggctggccgcgaaatacggctggagtgttgcgtttgcgttgagcgttgtaggcctgctgatcactatcgttaacttcgccttctgccaacgctgggttaaacagtacggttcaaaaccagacttcgagcctatcaactaccgtaacctgctgctgaccattattggtgttgtggcactgatcgctatcgccacctggctgctgcacaatcaggaagttgcgcgtatggcgctgggcgttgttgccttcggtatcgtggttatcttcggtaaagaagccttcgcgatgaaaggtgctgcgcgtcgtaaaatgatcgttgccttcatcctgatgctcgaagccattatcttcttcgtgctgtacagccagatgccaacgtcactgaacttctttgcgattcgtaacgttgagcactccattctgggtctggccgtagaacctgagcagtatcaggcactgaacccgttctggatcatcatcggtagtccgattctggccgctatctataacaagatgggcgataccctgccgatgccaaccaagtttgcaatcggcatggtgatgtgttctggtgcgttcctgattctgccgctgggtgcgaaattcgcgtctgacgctggtatcgtgtctgtaagctggctggtcgcaagctatggcctgcagagcatcggggaactgatgatctctggtctgggtctggcaatggttgctcaactcgttccgcagcgtctgatgggcttcattatgggtagctggttcctgaccactgccggtgcaaacctgattggtggttatgttgcgggtatgatggctgtgccggataacgttaccgatccgctgatgtcactggaagtctatggtcgcgtattcttgcagattggtgtcgctactgccgttattgcagtactgatgctgctgaccgcgccgaaactgcaccgcatgacgcaggatgacgctgcagacaaagcggcgaaagcagccgtagcgtaaaattcagggaaactcttttacaagccgctaacttttcgttagcggctttttttttgttcagcaacgcactaccatactttaaaccacagacaaaaggagttaccgatgaaattgttctacaaaccgggtgcctgctctctcgcttcccatatcaccctgcgtgagagcggaaaggattttaccctcgtcagtgtggatttaatgaaaaaacgtctcgaaaacggtgacgattactttgccgttaaccctaaggggcaggtgcctgcattgctgctggatgacggtactttgctgacggaaggcgtagcgattatgcagtatcttgccgacagcgtccccgaccgccagttgctggcaccggtaaacagtatttcccgctataaaaccatcgaatggctgaattacatcgccaccgagctgcataaaggtttcacacctctgtttcgccctgatacaccggaagagtacaaaccgacagttcgcgcgcagctggagaagaagctgcaatatgtgaacgaggcactgaaggatgagcactggatctgcgggcaaagatttacaattgctgatgcctatctgtttacggttctgcgctgggcatacgcggtgaaactgaatctggaagggttagagcacattgcagcatttatgcaacgtatggctgaacgtccggaagtacaagacgcgctgtcagcggaaggcttaaagtaatagccatcggcccacaggtcgttgtgggccgaaatgagatatttcagagctttgttgcgctgaagtaatgttctggtttggcaatacgatcctgagcagccaccacttgcagctcatattcctgcattgctttggtggtcaccatgatttcgtagactgcagcggtcacatgttccagcgcctcctgcagcgttgccccctgaagcagtttcaccagcagtaaaccgctcgtcacatcaccaacacctaccggctggcgcataccaaaatccaccagcggacggctgatatgccaggcttcatcggcggtgaccagcagcatttcaaaacggtcacggctgtagccagctcgcgccaggtgtttaaccaacacaatttgtggcccttgcgcaatgagttcgcgcgctgccagaaccgcttcttcgacgttatttaccgcatgctcacagagtatttccagctcaaccagatttggcgcaatgatatcgctggcaggcaaaccgtgccgcacatgaaactctgcgacacccggtgcaacgatacagcctttttccggatgacccattaccggatcgcaaaaatatttcgcctgcggattcgcggctttcacctgacggacgataccgaggatatgttcaccctgctccgccgatcccagatagccacttaatacggcatcacaggtgtgtaatttatcaatggcggcaatgccttgcacaatttcggttaaatggctgggcggcatcacgcagccagtccatttgccgtattgggtgtgattagaaaattgaacggtgttcagcggccagacgttcgcgcccaggcggcgcatcggaaactctgccgcactgttacccgcatgaccataaacaacgtgagactggatagcgagaatatttttcatcatgttccctgtataaaaaccagggggagtgatttctcactccccctttccacttaatgcattatttccagcaaatcagacagtaattctttttaccgcgacgcagtaaggtaaaacgaccaaacagacgatcttcttctttaaagaagtattcaggatcggactgtttttcaccgttaatggtgatggcattggaggcgatagttttacgtgcctgaccacgggaaggttgcagttcagaatcgaccagtgcctgcatcaggtctgcgcccttttccatctcaaccatcggtacgccgtcctgcgccagctgttcgaagtccgcttcactcagcgcactcaaagaaccgctgaacaggcattcggtaatacgttttgccgcctgtaaaccttcttcaccgtgaaccagacgagtcacctgctccgccagtacatactgggcgcgcggtgctttaccgctgtttttatcttcttcttccagggcgttgatctcttcaatgctcataaaggtgaagaacttcaggaagcggtaaacgtcggcatccgcagtgttgatccagaactggtagaatttgtacgggctggttttcttcggatccaaccagactgcgccgccttcagttttaccaaatttggtgccatctgctttagtgatcagcggaacggtcaggccaaacacctgattctgatgcagacgacgggtcaggtcgataccagaagtgatgttaccccactggtcagaaccaccaatttgcagcaccacaccgtactgtttgttcagacaggcgaagtcataaccctgcaacaggttgtaggaaaactcagtgaacgaaatcccctgatcttcacggttgagacgctgcttaaccgcttctttgttgatcatctggttaacggagaagtgtttgccaatatcgcgcaggaaggtcagcacattcatattgccgaaccagtcatagttgttcgccgcgatagcagagttttctccacagtcgaaatcgaggaacggggcaacctgcttacggattttgtccacccactcctgaacagtttcttcggtgttcagcttacgctcggcagctttgaagctcgggtcgccaatcagacccgtcgcgccgcctaccagcgcaaccggcttgtggcccgcctgctggaagcgtttcaggcataacaatggaacaagatgccccaaatgcaagctgtcagcggtaggatcgaagccgcaatagagcgcgatcgggccttgcgccagtcgctctgctaacgcttcctcgtccgtcacctgggctaccagcccccgctcttgcaattgtttaatcaagttactgcttgccatcaaaatctccatgtatataacgactgcacctttgccggtacacgacttttcgccagatgcgaaagagacatagaataaagtgccagaatcaggagtaccagcgattaaagcaagatttttgcatcttttcagggtgcaagacgatcaatcttccacgcatcattttcacgctggtacaaaaagcggtcatgcaggcgatgctcaccaccctgccagaactcaatctgttcaaggctgacgcgaaaaccgccccaaaagctcggcaatggcacttcgccctgttgaaacttctgcttcagctccaggaatttactttcaaggataccgcgggcagaaatgcgactggactgcttcgaaacccatgcaccaatctggctatcacgcgggcggctatgaaaatatttcatcacttcgagagtcgaaagtcgttctgctttaccgatcaccatcacctggcgctcaagggtatgccacgggaacagcaggctaacgcgcggattattttcgatttgatgtgctttacggctgccgaggttggtgtaaaacaccatgcctttttcgtcgtaatgtttgagtaaaacgatgcgctgataaggctgaccatgttcatccacggtagcgaccaccatcgcggtagggtccgccagtttggcttcacaagcctgagagagccaacgttcaaaaagggttaatggatcggcgggaagatcgcggcggcgtaacccgcctttggtgtattcacggcgcagatgcgcgatttgctgcaattcgtcgttatcagacatggttttctttacggattgtcagtgggtgacgctattgtgcgccgcccctggaaaaatctcaacgctgtggattttgtaactgacagttattcaagacgatgcggtcgcgtttatagacagtcgcttcatcgcctttcgaccagaaaacatagattccgtcagtgtaacgcgcgccagaggctgaaatgccctgtttgagatgcagtagttgattatcgtaaacaaaactgacctcctggcgcggattattcagtttgaccgtcaacggtttttcatcacactggtattccagcgtatcggtttgcatgcgctcaaccagctgattaaaggcgctacagccggagagaaggaccggcaaaatgataattaacagttttttcatagtcatatcccgaagactttcctggtctggagggcaatacgccctccctaacgttccaagtgtaacggcagacgcggtaagaaaaattcagttaactctgatatcacgggttagcggggaaaatagcccccagtaccgtctcctggcttgcgccagtgacggaaggcagatttcctggtaatcccgccagcgtccgccaggcaagccaggcgaaagccaatgcttccatgtcatcgccactaatgccaacggcatcggtggtggtgacttctgtgcctggcagtaatgccgccagacgcgccatgagtagcggattacgactacctccaccacataccatcaatcgttcgcagccaccgctcaacaaaacttgttcagaaatggtcacggcggtgagttctgccagtgtcgcctgcacatctcggggatcaacacccggaaaatggcgcaaatggcgctccagccaaccatagttaaagtattcgcgtccggtgcttttcggtgcaggttgcgagaaatacgggtcgctgagcatattttgcagcagtgggagaataactttacccgcccgtgcccactcggcatctttatcgtaaggtttaccggcctgacgccagatccaggcatccatcagcatgttaccaggaccggtatcgtagcccccaaccggctgcccaggaatgagcagtgacagattggcgatgccgccaatattgagcaccattcgtcgctcggttgggtgagccagcagcgcatgatggaacgcaggtaccagcggtgcgccttgtcctcccaaggcaatatcgcgacggcgaaaatcaccgacaaccgtaattccggtgcgtgccacaatttgattgttatcgccaatctgtaaagtgtgtggtgccacgcccgtcggttcatgccagacggtttgaccgtgacaaccgatcgcaactatatctcttgcctgcagattttgttccttaagcaaggcattgaccgcatcagcaaaaagtcgcccgagttgagtatcaagctgtccaaactgcgaaagtgtaagctgctggccctggcaaatatccagtacagcctgtttcagagataccgggatcggccaactcaaacttgccagctgtgcgacccggtgttcatcaattgtcgccaacacaacatcaacaccatcaaggctggtgcctgacataacgccaataaagcggcccgatttcatagttcatcctttttcaatctgacgtttgcgcaccactcaaacataaacttttcgtgaataccatgcggaatgaccgatttttaccgttggtagtaaaacattatcttcaaatcaataatcatcatgaatgttttgtttataattggttgatcctactttcattatgatttgctcatatttggtagaacatgtaaccatggattcacatatgccatatactttgaccatgagggatgcttgcgtggcgtttcatggtgaacaggagatttttcaatgattaaacgcgtattggttgtttcaatggtaggtctgtctcttgtcggttgtgttaataacgacaccctgtcaggggatgtttataccgcttctgaagcgaaacaagtacagaatgtcagctatggcaccatcgttaacgtacgtccggtacagattcagggcggtgatgattccaacgttatcggtgcaattggcggtgctgttcttggtggtttcctggggaatactgttggtggcggaaccgggcgttctctggctactgcagcaggcgctgttgcaggtggcgtagctggtcagggcgtacagagtgcaatgaacaaaacgcagggtgtcgagctggaaattcgtaaagacgatggtaataccatcatggtggtacagaaacaaggcaacactcgtttctctccgggccaacgtgtcgtactggccagcaatggcagtcaggtgaccgtttctccgcgctaaataagtttgcgtgtggtcaggttactgaccacacgcccccttcatttcaccctttggcctgtaactcaatgatattatgctcaagttttgcgatgagcgtaatcagttgctccagttcctctgcggagatgccatgtaatatttccgcgcgggttttgttaataacagcttccatttcgctgatcagcggctctgccttttccgtcagtttaatacgtttagcccgacgatcgctggcacaagtttgacgcgaaattaaccctttttcttccagttggtccagagtacggaccagtgatggctgctcgatgccaatcgcttttgccagttgaatttgcgactggtctggaggtaactgatggatattgtgtaacgtaacccaatgggtttgtgttaactccagcggtttcaggcgatggtctatcagagcacgccatatgcgcaccaaccgtgccagatcagaacctagtggcgattccaatttcatctccttataattagcttgctaagatattatgcggcttttagaatagtgtgcagcaattgtattgctaaaacaaatgtattgctgcatttggttaccgtcagacatatttttcagaaattgcgcgtaaatttttcgcacttaaagaatatttattaatctaacgcaatatattcggtcgtaaaggaatctactttgtgaagtttatgctcaatgcaacaggattgcccttacaagatctggtgttcggtgcgtccgtctactttcctccgtttttcaaagcattcgcgtttggattcgtcatctggcttgtcgtacaccgcctgcttcgtggctggatctacgccggtgacatctggcatcccttgttaatggatttatcgctgtttgcgatttgcgtttgccttgctctggcaatactgattgcgtggtaactatgtcaattaaaacaattaagtatttctcaacaatcattgtagcggtagttgcggttcttgccggatggtggctgtggaattattacatgcaatctccgtggacacgcgacggaaaaatacgcgcagaacaggtttctatcaccccacaggtgtcgggacgtattgttgagctgaatataaaagacaaccagctggttaacgcgggggatcttctgctcacgatcgataaaacgccctttcagatcgccgagctgaacgcacaggctcagctggcgaaagcgcaatctgacctcgcaaaagccaataacgaagcgaatcgtcgtcgtcatctctcacaaaattttatttctgccgaagaactcgataccgctaacctcaatgttaaagcgatgcaggccagtgttgatgccgcacaggcgacgctgaaacaggcacaatggcaactggcgcaaacggaaattcgcgccccggtgagtggatgggtgactaaccttactacccgcatcggcgattacgctgataccgggaaaccgctgtttgcccttgtcgacagccactcgttttacgtcattggttattttgaagaaaccaagttgcgccatatccgcgaaggtgcaccagcacaaattaccctctatagtgataacaaaacgttacagggtcacgtttccagtatcggtcgggcgatttatgatcagagcgttgaaagtaactcaagccttattccggatgttaaacctaacgtcccctgggttcgactcgcccaacgcgttcccgtccgctttgcgctggataaagtcccaggcgatgtcacgttggtgtcgggcaccacctgtagcattgccgtaggtcaataatgaacgcatcgtcatggtccttgcgcaatttgccctggttcagggccacgctggcgcaatggcgttatgcgttacgcaataccattgccatgtgtctggcgctgacggttgcctattatttaaatctggatgaaccctattgggcgatgacctcggctgcagtggttagctttcccaccgttggcggtgttatcagcaaaagcctcggacgcatcgctggcagtttgctcggagccattgcggcactgcttcttgccgggcatacgctcaatgagccgtggttttttctattgagcatgtcggcgtggcttggcttttgtacctgggcctgtgcgcacttcacgaataacgtcgcgtatgcatttcaactggcgggctacacggctgccatcatcgcctttccgatggttaatattactgaggccagccagctgtgggatatcgctcaggcgcgcgtttgcgaggtgattgtcggcattttgtgcggcggcatgatgatgatgatcctgcctagcagttccgatgctacagcccttttaaccgcattgaaaaacatgcacgcccgactacttgaacatgccagtttactctggcagcctgaaacaaccgatgccattcgtgcagcacatgaaggggtgattgggcagatactgaccatgaatttgctgcgtatccaggctttctggagccactatcgttttcgccagcaaaacgcgcgccttaatgcgctgctccaccagcaattacgtatgaccagtgtcatctccagcctgcgacgtatgttgctcaactggccctcaccgccaggtgccacacgagaaattctcgaacagttgctgacggcgctcgccagttcgcaaacagatgtttacaccgtcgcacgtattatcgccccgctacgcccgaccaacgtcgccgactatcggcacgtcgccttctggcagcgactacgttatttttgccgcctttatctgcaaagtagtcaggaattacatcgtctgcaaagcggtgtagatgatcataccagactcccacggacatccggcctggctcgtcataccgataacgccgaagctatgtggagcgggctgcgtacattttgtacgttgatgatgattggcgcatggagtattgcttcgcaatgggatgccggtgccaatgcattaacgctggcagcaattagctgcgtactctactccgccgtcgcagcaccgtttaagtcgttgtcacttctgatgcgcacgctggtgttactttcgctattcagctttgtggtcaaatttggtctgatggtccagattagcgatctgtggcaatttttactgtttctctttccactgctggcgacaatgcagcttcttaaattgcagatgccaaaatttgccgcattgtgggggcaactgattgtttttatgggttcttttatcgctgtcactaatcccccggtgtatgattttgctgattttcttaacgataatctggcaaaaatcgttggcgtcgcgttggcgtggttagcgttcgccattctgcgtccaggatcggatgctcgtaaaagccgccgccatattcgcgcgctgcgccgggattttgtcgatcagctaagccgccatccaacactgagtgaaagcgaatttgaatcgctcacttatcatcacgtcagtcagttgagtaacagccaggatgcgctggctcgccgttggttattacgctggggtgtagtgctgctgaactgttctcatgttgtctggcaattgcgcgactgggaatcgcgttccgatccgttatcgcgagtacgggataactgtatttcactgttgcggggagtgatgagtgagcgtggcgttcagcaaaaatcactggcggccacacttgaagaattacagcggatttgcgacagccttgcccgtcatcatcaacctgccgcccgtgagctggcggcaattgtctggcggctgtactgctcgctttcgcaacttgagcaagcaccaccgcaaggtacgctggcctcttaattacttaattacaccacaggcatagcgttcaccgccaccgcccagcggtttaggttgatcggacatattatcgccgccagcgtggaccatcagcgctttgtctttgatttcatccagtgatttcagacgaggcgcgatgacggcatcggtagctttgccgtcattattgacgaccagtgcaggcagatcgcctaaatgcccggcaccttctggcccttcatgtttaccggtattttgtggatcaagatgcccgcctgcggattccgcggcgctggctttgccatctttggtggctggctggcagcttcctttggcatgaatatggaagccatgttcaccggggggtaatgctttcagatcgggcgaaaactccagacctttatcggtttcagtaatggtgacgctaccaattgactgccctaccccttgcgacgtgacgaggttcatctcgactttttcactggcagcttgtgcgccggttgcaacaaccagcgccagaatagccagactaaaacgtttcataggacctccgttcattgtgcattcctgaataagtgtaaaccagtgacacatttttgaacggcggctattcctaaaagtgcttacggtacgtcgtaccccagtgccgctttacggatacgaaaccattgttgacgggtcattttcagtgtttctgcttcgacagctgcccgtacgcgctcaattttacctgaaccgataattggcagcggctgcgatggtaaacgtaatacccaggcgtaaaccacctgttcaatcgagcccgcgtttaactcctctgccaccacagccagttcatcacgcagcggctggaaataatcatcattaaacagacgaccaccaccaaggcaagaccacgccatcggacgaacacgcagttgttgtagttggtcgagcgtgccatccagcagtaacggctgatgcaccggggatatttccacctgattagtggcaagggtaaacggcagacgtgattgcaacagggcaaattgcgcaggcgtaaagttcgatacgccaaaatgacgcactttgccgctctgatgcagatgtttgaacgcgtccgccacttcatcggcatccattaacgggtctggtcggtggattaacagcaaatccagatgatcggtcgcgagattaattagcgactgttcggcgctcttaatgatgtgatcgcggtcagtgatgtaatgaccaatgacgttttcttcacgcgcggtcgtcgcgataccgcatttactgacgatttccatccgttcacgcaggtgaggtgccagtttcagtgcctcgccaaacgccgcttcgcactgatagccaccataaatatcagcatggtccacggtggtcacgccgagatccagatgctcttcaataaaactgaccagctggcgggcggacatattccagtccatcaatcgccagtagcccatcacaaaacgggaaaactccgggccttgcggcgcaatagtaatacgctgaaccataatcgcttcctcttatcagatatgagaggagtatacgcaagattaggttcaaaagagtgatggttgctccggttcgtctgatgacgctggcttatttgcgcgtaatttgcgcattaatcgctgccgacaaaggcgcagcacctcttgtttttcgccatcgctcattttattccagttaaaacgctcatcacgactacgaaaacagccgcgacaaaacccgcgttcgtcagactggcaaattccccggcacgggctctggacgggaaagaactctaattgctccgccacttcgccctcctcagataagattattaccattattgaagctgttaatgtccaaagtagcaactttgcttgcactagaccgactggtctactacactccaacgcatgaacaaacacaccgaacatgatactcgcgaacatctcctggcgacgggcgagcaactttgcctgcaacgtggattcaccgggatggggctaagcgaattactaaaaaccgctgaagtgccgaaagggtccttctatcactactttcgctctaaagaagcgtttggcgttgccatgcttgagcgtcattacgccgcatatcaccagcgactgactgagttgctgcaatccggcgaaggtaactaccgcgaccgcatactggcttattaccagcaaacactgaaccagttttgccaacatggaaccatcagtggttgcctgacagtaaaactctctgccgaagtgtgcgatctgtcagaagatatgcgcagcgcgatggataaaggtgctcgcggcgtgatcgccctgctctctcaggcgctggaaaatggccgtgagaaccattgtttaaccttttgtggcgaaccgctacaacaggcacaagtgctttacgcactatggctgggtgcgaatctgcaggccaaaatttcgcgcagtttcgagccactggaaaacgcgctggcccatgtaaaaaacattattgcgacgcctgccgtttagcaggcattttttatcaccagacgaccgggagcctttatgtcatctgaaaaactgtattccccactgaaagtgggcgcgatcacggcggcaaaccgtatttttatggcaccgctgacgcgtctgcgcagtattgaaccgggtgacattcctaccccgttgatggcggaatactatcgccaacgtgccagtgccggtttgattattagtgaagccacgcaaatttctgcccaggcaaaaggatatgcaggtgcgcctggcatccatagtccggagcaaattgccgcatggaaaaaaatcaccgctggcgttcatgctgaaaatggtcatatggccgtgcagctgtggcacaccggacgcatttctcacgccagcctgcaacctggcggtcaggcaccggtagcgccttcagcacttagcgcgggaacacgtacttctctgcgcgatgaaaatggtcaggcgatccgtgttgaaacatccatgccgcgtgcgcttgaactggaagagattccaggtatcgtcaatgatttccgtcaggccattgctaacgcgcgtgaagccggttttgatctggtagagctccactctgctcacggttatttgctgcatcagttcctttctccttcttcaaaccatcgtaccgatcagtacggcggcagcgtggaaaatcgcgcacgtctggtactggaagtggtcgatgccgggattgaagaatggggtgccgatcgcattggcattcgcgtttcgccaatcggtactttccagaacacggataacggcgcgaatgaagaagccgatgcactgtatctgattgaacaactgggtaaacgcggcattgcttatctgcatatgtcagaaccagattgggcggggggtgaaccgtatactgatgcgttccgcgaaaaagtacgcgcccgtttccacggtccgattatcggcgcaggtgcatacacagtagaaaaagctgaaacgctgatcggcaaagggttaattgatgcggtggcatttggtcgtgactggattgcgaacccggatctggtcgcccgcttgcagcgcaaagctgagcttaacccacagcgtgccgaaagtttctacggtggcggcgcggaaggctataccgattacccgacgttgtaatccaacattgcgagcggcgtaaagccgccgctatactaaaacaacattttgaatctgttagccattttgaggataaaaagatgcgtcttcttcataccatgctgcgcgttggcgatctgcaacgctccatcgatttttataccaaagtgctgggcatgaaactgctgcgtaccagcgaaaacccggaatacaaatactcactggcgtttgttggctacggcccggaaaccgaagaagcggtgattgaactgacctacaactggggcgtggataaatacgaactcggcactgcttatggtcacatcgcgcttagcgtagataacgccgctgaagcgtgcgaaaaaatccgtcaaaacgggggtaacgtgacccgtgaagcgggtccggtaaaaggcggtactacggttatcgcgtttgtggaagatccggacggttacaaaattgagttaatcgaagagaaagacgccggtcgcggtctgggcaactaatctcctgccgggcgtgaactcatcgcgcccgcatctttactgcatcgacaagtaatatttgtcataatgcgcgctgcaatttatccgtattaagagaatcagatgtccgataacgctcaacttaccggtctgtgcaaccgttttcgtggtttttatcctgttgtgatcgatgttgaaacagccggatttaacgccaaaaccgatgcgctgcttgagattgccgccatcaccctgaaaatggatgaacaaggctggctgatgccggacaccacattacatttccacgtcgaaccatttgtcggcgcaaatttgcagccagaggccctcgccttcaacggcattgacccgaacgatcccgatcgcggcgcggtcagcgaatacgaggcgctgcacgaaatttttaaagttgtacgtaaaggtattaaagcgagcggctgtaaccgcgccattatggtggcgcacaatgccaattttgatcacagctttatgatggccgccgcagaacgcgcctcactgaaacgtaacccgttccaccctttcgccacttttgacactgctgcactggccgggctggcactcggacaaaccgtattgtcaaaggcttgccagaccgctggcatggacttcgacagcacccaggcgcactccgcgctgtacgacaccgaacgcactgctgtgctgttttgtgaaatcgtcaaccgctggaaacgtctgggaggctggccgctacctgccgccgaagaggtgtaatcgagtcgatgcctgatgacatgcaatgattcaggcatctatagtgaggctattccacgcatcaagcatgatattcacggggaatagcgttaatggcagataatccagacccttcatcgctcctgccggacgtgttttcaccggcgacccgcgactggtttcttcgcgcctttaaacagccgaccgctgtccagtcgcaaacctggcatgtggcggcgcgaagcgaacatgcgctggtgattgcaccgaccggctccgggaaaacgctggcagcatttctctacgccctcgatcggctcttccgcgaaggcggcgaagatacccgcgaggcgcataagcgtaaaacctcacgcatcctctatatttcaccgataaaagctctgggcaccgacgttcagcgcaacttgcagctcccgttgaagggtattgccgatgaacggcggcggcgcggcgaaacggaagtcaatcttcgcgtagggatccgtactggcgatacgcctgcacaggaacgcagcaaactcacccgtaatccgccggatattctgatcaccacacccgaatcactctatctgatgctgacctcccgcgcgcgcgaaacgctacgcggcgtcgaaacggtaattattgatgaagtccacgcggtagcgggcagtaaacgtggtgcgcatctggcgttaagtctggagcggctcgatgcgctgctccacacctcagcacagcgaattggcctttctgccactgtgcgctcagccagcgatgtggcagcatttcttggtggcgatcgcccggttacggtagtcaacccgcccgcaatgcgccatccgcagatacgaattgtcgtaccggtcgccaatatggatgatgtctcatcggtcgccagcggcaccggcgaagacagccatgccggccgggaaggctccatctggccatatattgaaacgggtatccttgatgaagtgttgcgccatcgctcgaccattgtctttactaattcacgtgggctggcggaaaaactgacggcacgattaaatgagctttacgccgcacgcttacagcgttccccgtctatcgccgttgatacggcccatttcgagtcgacctccggcgcaacctctaaccatgtacaaagtagcgacgtttttattgcccgctcacaccacggctccgtctctaaagaacaacgagcaatcaccgaacaggcgctgaaatcgggtgaattacgctgcgtggtcgcaacctccagtctcgaactggggattgatatgggcgcggtggatctggtgattcaggtggcaacgccgctttctgttgccagtgggttacaacgcattggtcgcgccggacatcaggttggcggtgtatctaaagggctgtttttccctcgtacccggcgtgacttagtcgattccgcagtcattgtagagtgtatgttcgcaggcaggctggaaaacctgacaccgccgcataatccactcgacgtccttgctcagcaaaccgttgccgccgcggcgatggatgcattacaggtagacgaatggtactcccgcgtacgccgtgccgcaccgtggaaagatctgccaagacgtgtttttgacgccacgctggatatgctttccgggcgctatccctctggcgatttttctgcttttcgccccaaactggtctggaacagggagaccgggatattgaccgcccgacctggcgctcaattgttggcggttaccagcggcggcaccattccggatcgtggcatgtatagcgtgttattacccgaaggtgaagaacaggccggttcgcggcgggtgggtgaactggatgaggagatggtatatgagtcgcgggtgaacgacattatcactctcggcgctacctcatggcggatccagcaaatcacccgcgatcaggtgattgtgactcctgctccgggtcgttctgcccggctccccttctggcgtggtgaaggtaacggacgtccggctgaattaggcgagatgatcggcgattttcttcatttactggcggatggcgcgttcttttccgggactattcccccgtggctggcagaagaaaatacgaacgccaatattcaggggttgattgacgagcaacgcaacgcgacgggcatcgttccggggagtcgccatctggtcctcgaacggtgccgtgatgaaattggcgactggcgtattattttgcactctccctatggaagacgggtgcatgaaccttgggcgctggcgattgccgggcgaatacatgccctatggggcgctgacgcgtctgtggtcgccagtgatgacggcattgttgcgcgcattcctgacactgatggtaaattgcccgacgccgcgatttttttgtttgaaccagaaaagttgctgcaaattgtccgcgaggcggtaggcagctcggcacttttcgccgcccgttttcgcgaatgcgccgcgcgggcattattaatgccggggcgcactccgggccatcgcaccccgctttggcaacaacggctgcgcgccagtcagttgctggaaatcgctcaggaatatccggattttccggtcattctcgaaaccctacgcgaatatctgcaagatgtttatgatcttcccgcactggaacgtttgatgcgtcgcctgaacggtggcgaaattcaaatatccgatgtaacgaccactacgccctcgcctttcgccacaagtttattgttcggctatgtcgcggaatttatgtaccagagcgacgccccgctggcagagcgccgggcatccgtactgtcgctggacagcgagttactgcgcaatctactcggacaggtcgatccgggggaattactcgacccgcaggtcattcgccaggtggaagaagagttgcaacgactggctcctggcagaagagcgaaaggtgaagaaggattgttcgacctgctgcgcgaactggggccaatgaccgttgaagacctggcgcaacggcatacaggcagcagtgaagaggttgcgtcgtatctggaaaatcttcttgcagtaaaacgaatcttcccagcgatgattagcggacaggagcgtcttgcctgtatggatgatgccgccaggctgcgtgatgccctcggcgtacgactaccagagtcattgccagagatttatttacatagagtcagttacccgcttcgcgacctctttctgcgctatctccgggctcatgctctggtcacggctgaacaactggctcatgagtttagtctcggtattgccattgtcgaagagcagcttcagcaactgcgtgaacagggtctggtgatgaatctgcaacaagacatctgggtgagcgatgaagtatttcgtcgtctgcgtttgcgctcgctgcaagccgccagagaagcgacgcgtcccgttgcagccacgacctatgcgcgattgctgctggaacgtcagggcgtattacccgccaccgatggtagcccggcgctctttgcctcaacatcgccaggcgtttatgagggcgtagatggcgtgatgcgggtgatcgaacagcttgccggagtcggtttacccgcctcactctgggaaagccagatcctgcctgcccgcgtacgcgactattcgccagaaatgctcgatgaattactggcaaccggtgcggttatctggtcggggcaaaaaaaactgggtgaagatgacggcctggtggcactgcatctacaggaatatgctgcagaatcgttcactcccgccgaagcggatcaggcgaatcgttcggcgctgcaacaagcgatagtcgctgttctggctgacggaggagcctggtttgcacaacaaatcagccaacggatacgcgacaaaatcggcgaatcggttgatctctctgccctgcaagaggcgttatgggcgctggtctggcaagacgtcatcaccagcgacatttgggcaccgttacgcgccctcacccgcagcagttccaacacacgcacctcaactcgccgcagtcaccgggctcgtcgtggacgtcctgtctatgcgcaacccgtctcgccgctggtatcttacaacacaccaaatctggctggacgctggtcgttattgcatgtggagccactaaacgataccgaaaggatgctggcgctggcggaaaatatgctcgaccgctacggcatcatcagtcgtcaggcggtgatagccgaaaatatccctggcgggtttccatcgatgcaaacgctttgtcgaagtatggaagactccgggcgaattatgcgaggtcgttttgtagaaggtctgggtggcgcgcaattcgctgaacgtctgactattgaccgattgcgcgatctggcgacacaagccacgcaaacgcgccactatacaccagtggcgctctctgccaacgatccggctaatgtgtggggaaatcttctgccctggcctgcacatccggcaacgctggttccaacgcgtcgggcgggtgcgctggtggtcgtttctggcggcaaattgttactctatctggcgcaaggtggcaaaaaaatgctggtctggcaggaaaaagaggaattactcgccccagaggttttccacgcgctgactaccgcactgcgtcgcgaaccacggctgcgctttacgctaacagaagtgaatgatctaccggtccggcaaacgccgatgtttacgctgctgcgtgaggcgggattttcaagttcgccacaagggctggattggggatagagaaaggactgacggatgcccgttcgcatccgtcagtattgcaggacggattattccgcgtccggctcttcagacttgtatttagcggcagtttctttgatcagctgctgcagttcgccacgctgatacatttcgatcacgatatcacaaccgccgaccagctcgccgtcaacccacagttgcgggaaggtcggccagttagcatatttcggcagttccgcacgaatgtccggattctgcagaatatcaacataggcaaaacgttcgccacatgcggcaagcgcctggactgcctgggcagagaaaccgcagctcggcagtttcggtgaacctttcatgtacagcaggatcgggttttcagcaatctggcgttggattttttcgatagtggtgctcattgtcttgcttcctcaaacttctttacggcagtaatctgacattgtagcgggtcagtgcggcatcggaaaataacattttcatcacgcttttgctattttatccctttgctctatttgttgcatttcaaatattcgtttcttctctgatgccggcaaactggcgtatttataaccatttttagctttcactgctgcatttttttgcgctcgccaacgaaacgtattttttaacaataaaagctattaactttctcttcttctatgcattagaatcatcaagttttgtaaatcagacgcaggcatgatagacctgccttaacagagggacgctcagtggcgcggataaaccgtatttcgatcacgctctgtgctttactttttaccaccctgcctttaacgcctatggcccatgcttcaaagcaagccagggagagttctgctaccactcatatcaccaaaaaagcagataaaaagaaaagcacggcaaccaccaaaaagacccagaaaacagcgaaaaaagccgccagtaaaagtacgaccaaaagcaaaaccgcttcttccgttaaaaaatcttccattaccgcttctaaaaacgccaaaactcgcagcaaacacgccgtcaataaaacggcctcagccagctttaccgaaaagtgtaccaaacgtaagggctataaatcgcattgtgtgaaagtcaaaaatgccgcgtcaggaactcttgccgacgcgcacaaagcgaaggtgcaaaaagctacgaaagtggcaatgaataaactgatgcagcaaattggtaagccatatcgttggggtggcagctcaccgcgtaccggttttgattgcagcggcctggtttattacgcttataaagatttggtgaaaattcgtattccgcgtacggcgaatgaaatgtatcacctgcgtgatgcagcgccaatcgaacgtagtgaactgaaaaacggcgacctggtctttttccgtactcagggacgcggcacagccgatcatgtcggcgtgtatgtcggcaacggcaaatttattcagtcaccgcgcacaggtcaggaaattcaaatcacttctctcagtgaagactactggcagcgccactatgttggcgctcgtcgggtaatgaccccaaaaacacttcgctaaaactttaccctgttgttacggcaacagggtaagttcatcttttgtctcaccttttaatttgctaccctatccatacgcacaataaggctattgtacgtatgcaaattaataataaaggagagtagcaatgtcattcgaattacctgcactaccatatgctaaagatgctctggcaccgcacatttctgcggaaactatcgagtatcactacggcaagcatcatcagacttatgtcactaacctgaacaacctgattaaaggtaccgcgtttgaaggtaaatcactggaagagattattcgcagctctgaaggtggcgtattcaacaacgcagctcaggtctggaaccatactttctactggaactgcctggcaccgaacgccggtggcgaaccgactggaaaagtcgctgaagctatcgccgcatcttttggcagctttgccgatttcaaagcgcagtttactgatgcagcgatcaaaaactttggttctggctggacctggctggtgaaaaacagcgatggcaaactggctatcgtttcaacctctaacgcgggtactccgctgaccaccgatgcgactccgctgctgaccgttgatgtctgggaacacgcttattacatcgactatcgcaatgcacgtcctggctatctggagcacttctgggcgctggtgaactgggaattcgtagcgaaaaatctcgctgcataataactgatggcaaatgcagcattgcctgaagcgctacgcttatcaggcctacgcggatcatcgatgtaggtcggataaggcactcgccgcatccgacaagcgctgcatgatacgacgcctaacgcgtcttttcatgtcaacgcggatgagtcgttaacaccgcattcggcaagataaatcgcacgttgtcagcaactgtaacgcagaaggttatccttctgcgtttttgtttaattagctgttagcaacgcaaactgtttcaggttgttttctggctgacataaacaccagcaataatgccagtcccgcgacaatcgctcccatcaccggcacaaagctgtatcccagcccagcggaaattaccgcaccaccagcagctgctcccagcgcatttccaagattaaaggcaccaatattgactgatgaagacagacctggcgcttcactggcgacacgcatcacgcgcatctgtaacggcggtacgaccgcaaaggttgctgcgccccacaccaccatgctaatagctgcgccgaactcattgcgggccaggaacgggattgccagcataatcaccatcaacaacaacaaaaagcctttcaacgtgccgttaactgaacgatctgccagtttgccgccgagatagttaccgatagagaatccgacaccaatcagcaccagcattgccgtgacgaacaccggtgttgcgtgggtaatactttgcagtaccggagagatataggtgtagagagtaaacattgcaccagctcccagtaccgtcgtcagcaatgcagacagcacctgcggacgcattaataccgccagctcttttttcacttcaggtcgtgcccctgcaccacctttaggtaatgagaagaacagacttaccattgaaatcactcccagccccgccgttgccagaaatgacatccgccagccgatggtttcacccaaccaggtcgccgccggcacgccaccgatatttgccagggttaaccccataaacatagtggcaactgcgctggcctgtttatgttttggcaccacgcttgcggccacgactgaacccaaaccaaaaaatgctccgtgattcaggctggtcaaaatgcgtgaaagcatcagggtcatataatccggcgcgatggcggaaagtacgttgccgagcgtgaaaattgccatcaggaaaatcaacgcactgcggcgggcacgatgagaaagtagaagcgtcatcagcggcgcgcccaccattacgccaactgcataggcactgattaacattccggcagcgggaatcgagacatccacaccgcgcgcaatgacgggcaacaagcccattggcgagaactccgttgtcccgataccaaacgcgccaatcaccagcgccagcaacggatagttaattttcatgccttatctccacctcttcgcgtcattacgcgatattcattaaagtggcgaaagcatgacagcaatcacaaaaaaatgaaaataacaaaaagagaaaacacttttgccattttgctaacaaacaggaaggagatgcgagggagaacgcgctccctcgagaggaaatcagtgcagcgcggcagtcaaacccacggctacgatcaaaccgaggacgataatcgttgttaccagtgaaaatttaaggtcggtgctcatcaagttttctccttttttattaccacacaaaaagtgatattacgcatttttacacactgtgatgaaaaaatctcccgtcatttataatgataagtgtttttaccacttccccttttcgtcaagatcggccaaaattccacgcttacactatttgcgtactggccattgaccccttcctgacgctccgtgtcgtttttccggcgtaccgcaacacttttgttgtgcgtaaggtgtgtaaaggcaaacgtttaccttgcgattttgcaggagctgaagttagggtctggagtgaaatggaatggcaacaataaaagatgtagcgaaacgagcaaacgtttccactacaactgtgtcacacgtaatcaacaaaacacgtttcgtcgctgaagaaacgcgcaacgccgtgtgggcagcgattaaagaattacactactcccctagcgcggtggcgcgtagcctgaaggttaaccacaccaagtctatcggtttgctggcgaccagcagcgaagcggcctattttgccgagatcattgaagcggttgaaaaaaattgcttccagaaaggttacaccctgattctgggtaatgcgtggaacaatcttgagaaacagcgggcttatctgtcgatgatggcgcaaaaacgcgtcgatggtctgctggtgatgtgttctgagtacccagagccgttgctggcgatgctggaagagtatcgccatatcccaatggtggtgatggactggggtgaagcaaaagctgacttcaccgatgcggtcattgataacgcgttcgaaggcggctacatggccgggcgttatctgattgaacgcggtcaccgcgaaatcggcgtcatccccggcccgctggaacgtaacaccggcgcaggccgccttgccggttttatgaaggcgatggaagaagcgatgatcaaggtgccggaaagctggattgttcagggtgactttgaacccgaatctggttatcgcgccatgcagcaaatactgtcgcagccgcatcgccctactgccgtcttctgtggtggcgatatcatggcaatgggcgcactttgtgctgctgatgaaatgggtctgcgcgtcccgcaggatgtttcgctgatcggttatgataacgtgcgcaacgcccgctattttacgccggcgctgaccacgatccatcagccaaaagactcgctgggtgaaacagcgttcaacatgctgttggatcgtatcgtcaacaaacgtgaagaaccgcagtccattgaagtgcatccgcgcttgattgaacgccgctccgtggctgacggcccgttccgcgactatcgtcgttaatcacccgttgcgggagtctcttccggctcccgcagccactccttattcagcgtctcactatcgccgagatactcaagcaaccaggttaacgcaggcgacatatcattttgctgccatgtcagacaacatgccgaatccggaaaggggttttccagttctaatgctacccacttcccctcattaagccacggtttggcgaaatgtgttggcaccatccctatgcataatcctgccgagatacaggttgccgatgattcccagtcaggcacgacaagtcttttttggttatccagcaaccaggtaatacgcttaggtagcgttcgcgaggtgtcttcgcgcaccaacgacggccagttgcgcaacgtatcatcgctgaatgggccatccatcaacgccagcgggtggtggctggcaacaacgcaactccagcttagcatccccatatcccggaaggcataacgaccgcctaccggaatcgcgcgtgttgcgccaatcgccagttccacgcgcccgtcggaaagcgcatcccagacaccgttgaacacttcctgaaagacaagaagttcgacatcatcaaaatggcgataaaaatcaacgatcatctgccgtgtacgttctggcctgacaatattatccactgcgatagctaactgaccgcgccagccgttcgctatctgctgacattgctggcgggtgatctgcatttttttgacaacagagcgcccttctttgagaaaccacgctccagcagcggtcagctccacatcacggtgccgtcgttcaaagagcggcaccgccagccactcttccagctgacgcacggtatagctgaccgcagaaggaacgcgatgcagctcctgtgccgcagcgctaaaactaccattacgcgctaccgcatcaacaacttcgagtgaatattctgaccacatagtctgcctacaaaatttttgaaaccagtcatcaaatattaccgtttcacaacactaatttcactccctacactttgcggcggtgtttaattgagagatttagagaatatacatgcaacctgggaaaagatttttagtctggctggcgggtttgagcgtactcggttttctggcaaccgatatgtatctgcctgctttcgccgccatacaggccgacctgcaaacgcctgcgtctgctgtcagtgccagccttagtctgttccttgccggttttgccgcagcccagcttctgtgggggccactctccgaccgttatggtcgtaaaccggtgttattaatcggcctgacaatttttgcgttaggtagtctggggatgctgtgggtagaaaacgccgctacgctgctggtattgcgttttgtacaggctgtgggggtctgcgccgcggcggttatctggcaagcgttagtgacggattattatccttcacagaaagtcaaccgtatttttgcgaccatcatgccgctggtgggtctgtctccggcacttgctcccctgttaggaagctggctgctggtccatttttcctggcaggcgattttcgccaccctgtttgccattaccgtggtgctgattctgcctattttctggctcaaacccacgacgaaggcccgtaacaatagtcaggatggtctgacctttaccgacctgctacgttctaaaacctatcgcggcaacgtgctgatatatgcggcctgttcagccagtttttttgcatggctgaccggttcaccgttcatccttagtgaaatgggctacagcccggcagttattggtttaagttatgtcccgcaaactatcgcgtttctgattggtggttatggctgtcgcgccgcactgcagaaatggcaaggcaagcagttattaccgtggttgctggtgctgtttgctgtcagcgtcattgcgacctgggctgcaggcttcattagccatgtgtcgctggtcgaaatcctgatcccattctgtgtgatggcgattgccaatggcgcgatctaccctattgttgtcgcccaggcgctgcgtcccttcccacacgcaactggtcgcgccgcagctttgcagaacactctacaactgggtctgtgcttcctcgcaagtctggtagtttcctggctgatcagtatcagcacgccattgctcaccaccaccagcgtgatgttatcaacagtagtgctggtcgcgctgggttacatgatgcaacgttgtgaagaagttggctgccagaatcatggcaatgccgaagtcgctcatagcgaatcacactgatctatatcgatatacttatacttaggctgctaacaaaattttgttgtatgattgaaattagcggcctatactaatttcgagttgttaaagctacgataaatattatgtttttacggggacaggatcgctcccgactcactatggatggtcatttcggcaagggttcctcctttccctctgttctacgtcggattatagactcgcggttttttctgcgagatttctcacaaagcccaaaaagcgtctacgctgttttaaggttctgatcaccgaccagtgatggagaaactatgagttcatcgtgtatagaagaagtcagcgtaccggatgacaactggtaccgtatcgccaacgaattacttagccgtgccggtatagccattaacggttctgccccggcggatattcgtgtgaaaaaccccgatttttttaaacgcgttctgcaagaaggctctttggggttaggcgaaagttatatggatggctggtgggaatgtgaccgactggatatgttttttagcaaagtcttacgcgcaggtctcgagaaccaactcccccatcatttcaaagacacgctgcgtattgccggcgctcgtctcttcaatctgcagagtaaaaaacgtgcctggatagtcggcaaagagcattacgatttgggtaatgacttgttcagccgcatgcttgatcccttcatgcaatattcctgcgcttactggaaagatgccgataatctggaatctgcccagcaggcgaagctcaaaatgatttgtgaaaaattgcagttaaaaccagggatgcgcgtactggatattggctgcggctggggcggactggcacactacatggcatctaattatgacgtaagcgtggtgggcgtcaccatttctgccgaacagcaaaaaatggctcaggaacgctgtgaaggcctggatgtcaccattttgctgcaagattatcgtgacctgaacgaccagtttgatcgtattgtttctgtggggatgttcgagcacgtcggaccgaaaaattacgatacctattttgcggtggtggatcgtaatttgaaaccggaaggcatattcctgctccatactatcggttcgaaaaaaaccgatctgaatgttgatccctggattaacaaatatatttttccgaacggttgcctgccctctgtacgccagattgctcaatccagcgaaccccactttgtgatggaagactggcataacttcggtgctgattacgatactacgttgatggcgtggtatgaacgattcctcgccgcatggccagaaattgcggataactacagtgaacgctttaaacgaatgtttacctattatctgaatgcctgtgcaggtgctttccgcgcccgtgatattcagctctggcaggtcgtgttctcacgcggtgttgaaaacggccttcgagtggctcgctaaaggctattctatcgccccctctccgggggcgatttcagatcaggcttctgtacctggttgattcatggcattttctcgtgccgccagcacacgttctaccgtatctaccactgcctgagtttgtggatcgatttcaatgttgacgcgtgcgccaagttttttcttcccaagagtcgtgcgttccagtgtttccggaattaaatggacgcaaaaacgcgttggcgtgacttcgccgacggtcaggctaataccgtcgatgccaataaatcctttgtacagaatatatttcatcaactgactatcctggactttaaaccagatctggcgattattttccgaggttaatattttcgccacttcagcggtggtcataatatgacctgacattaagtgtccgccaatttcatcactgaatttcgccgcacgctcaacgtttacccaatcccccacttttaaatcgccaagattggtaatgcgtaacgtttctttcatcaggtcaaaactgacatggttgccgttaatttccgtcacggtcaggcagcaaccgttatgcgccacggacgcaccggtttccaggccgtccagcatgtggtcgggtaactccaccacatgcgtacgaaaatttggtttctcgtcaatcgacaccagttttgcggtgccctgtacaatccccgtaaacatacttacaactcctgaaatcagttaagacattctgttcagcacaatagcaggtggcaaacgcccttaccagtgaaggggtaagaatgactattttttcactggagaattaataaatcctcgatacaatagactgaatttcccctgcttcttctttttgctgcccattcaggcggctttttagtctctcatataactacaaataaaaggtgttcacgtgcagaagtatatcagtgaagcgcgtctgttattagcattagcaatcccggtgattctcgcgcaaatcgcccaaactgcgatgggttttgtcgataccgtgatggcgggcggctatagtgccaccgacatggcggcggtcgctatcggtacatctatctggcttccggcgatcctctttggtcacggactgctgctggcattaacgccggttatcgcgcaattaaatggttctggtcgacgtgagcgcattgcgcatcaggtgcgacaaggtttctggctggcaggttttgtttccgttctcattatgctggtgctgtggaatgcaggttacattatccgctccatggaaaacatcgatccggctctggcggagaaagccgtgggttatctgcgtgcgttgctgtggggcgcgccgggatatctgttcttccaggttgcccgtaaccagtgtgaaggtctggcaaaaaccaagccgggtatggtaatgggctttatcggcctgctggtgaacattccggtgaactatatctttatttatggtcatttcggtatgcctgagctcggtggcgttggttgtggcgtggctactgcggcggtgtattgggtcatgttccttgccatggtttcttacattaaacgcgcccgctccatgcgcgatattcgtaacgaaaaaggcaccgcgaaacccgatcctgcggttatgaaacgactgattcaactcggtttgccgattgcgctggcactattctttgaagtgacactgtttgccgtcgtggctctgttagtgtctccgctcggtattgttgatgtcgcaggacaccagattgccctgaactttagttcactgatgtttgtgcttccaatgtcgctggcggcagcggtaactatccgcgtaggttatcgtctgggtcagggctcaacgctggatgcgcaaaccgctgcgcggaccgggcttatggtgggtgtctgtatggcaaccctgacggccatattcacggtttcactgcgggagcaaatcgccctgttgtacaacgacaatcccgaggttgtaacgctggctgcgcatttgatgttgctggcggcggtatatcagatttctgactcgatccaggtgattggcagtgggattttgcgtggttataaagatacgcgttccattttctatattacctttacggcttactgggtgctgggcttgccaagcggctatattctggcactgaccgatctggtcgttgaacctatggggccagcaggcttctggataggctttattattggcctgacgtcggcagccattatgatgatgctgcgtatgcggttcctgcaacgtctgccgtcagccatcattctgcaacgagcgtcccgctaataaagacaaggcgcaaccttcacgggttgcgcctgtgtttttacgcaggctggagcgttgcgccaatcccgtcttcgtctggctgtagtttcagtgcgttacacagagtttgccgactggcatctgttatctcaacgcgtatatccccggtaacttcccctttcacattgatgaagtcaggtgaaatttctttcgcactggtttgcaggcaaatcgctccctctccgcgcaggcgtttcactttcagttgcacatgcgttgccgcaccagtgatcagccacagttttccgccattcagattgatgttaccaacaatgaaagtgacactgtcaccttttaccgtactgccgtcgagaatcaacacaccgccctgctgtacagtaatcgttgattgttgcagctctgcgccataaccaataatcattgaagcgccgtccagtaatgcaacactcccggtcagttcaaccggtgcgcgatcttcctctacgacaaaattttcgtccgcgctggtgggtgacaacaggatcactgttccaccttgtattaccgcattttccagcgtaccggcatgcacttcagcccgaccacccacattcacggacaggttttgcgtcttaccggaactgtagagctgaaggccatccgtccccagacgataaatggatccattctcaacaatagtgtcagagtcttcaccaccgagattattcatggtgccaccagcaagcaacgtatcactggctttcccggccagcataaaaacgccgccctgattaatctcacaattgctggcttccccacctggatacaccaacaattcaccaccttcatctaccacgaccgctgaggttgtcccattgaccaacaggccgccctcttgatcgagaatgattttttccgcgcgatgtccttccagtacacgcaggttaccgccattttccagcaacaaaccgcaggcataaccctgatcaacgctgaattcaccttcgggatggcggccattaaccgtagcgagcgtagagagactaattgcgcctccctcggactgaacaacatctgtggcaatggcaccgtcgctgaccgatagcgtgccattgttaccgtactgtgtgcatttgacgatcccaccggttgcaactttcaaccagccggtccccgtgaccacggtattttcagctcttccgccagcctcaacaattaactcgccttcagtaagttgagtcgcgccaatgacctcgccggtcttaacaatttgcacgttcccgtcgctcatcaagtttttcgcatcagatcccatgatttattcctttgctgcatctgtgtgcctttattgctacctaagtgtaaaggctacggaggatttatccacgacagatttgagatggtggcaaacaactctgtttaaactctgatacacgaattattgggttgtatcagatgtaaatgcgatcctgaataaaaatcgcccttgcaaatcaacaaaatatagccaatttgcttaaaagctctgcaaacggtcgaaatagcgcagaaaattacgttttgcctcttgccaccttcccactctgccgctaatattcgtccccgttgtcacctacaacgttgcgttcatagctcagttggttagagcaccaccttgacatggtgggggtcgttggttcgagtccaattgaacgcaccatcctgcgtccgtagctcagttggttagagcaccaccttgacatggtgggggtcggtggttcgagtccactcggacgcaccagattttcttaatctggtcttctcctttttccctctgtttcttctctgtatccaatacgttaaaagatttacactgtcttcgtatgcgttatcagaaggagaatcgctatggcaactttgttacaacttcatttttctttcaatggcccatttggcgacacaatggctgagcagcttaaaccgcttgctgagtcgattaatcaggaacctggttttctgtggaaggtatggaccgaaagtgaaaagaaccacgaagccggtgggatctaccttttcactgatgaaaaaagcgcccttgcctatctggaaaaacacactgcccgactgaaaaatctcggcgttgaggaagttgtcgccaaagttttcgatgtcaatgagccactgagtcaaatcaatcaggcaaaactcgcctgacagaatttaatcaagggcggttagcgcccttttcatccctgtctgaaatttctcaaattctaaaaatttcaaccaaacttatctgataacactaaattcgaaagaatgcgtacaggtaagtaacaatgaaaaaaattgctattgtgggtgccgggcctacggggatctacaccttattctcgcttctacagcaacaaactccactttctatttttatcttcgagcaggctgacgaggccggtgtcgggatgccatacagtgatgaggaaaactcaaaaatgatgctggcaaatattgccagtattgaaataccgccgatttattgtacgtatctcgaatggctacaaaagcaagaagccagccatctccagcgttatggcgttaaaaaagaaaccttgcacgatcgtcagtttttaccgcgaattctgctgggcgaatatttccgcgatcaatttttacgattagtagaccaggcacgaaagcaaaaatttgcagtggctgtttatgaatcatgccaggttaccgatctgcaaattacaaatgctggcgtcatgctcgctacaaatcaggatttacccagcgagacgtttgatttagcggtgattgccacgggtcacgtctggcctgatgaagaagaagcaacccgaacgtattttcccagcccgtggtcaggcctgatggaagcaaaggtcgatgcgtgtaacgtgggtattatgggaacatccttgagcggactggatgcggcaatggcagtggctattcagcatggttcgttcattgaagatgataaacaacacgtcgtttttcaccgcgataacgcaagtgaaaagctaaatatcacgttgatgtcgcgcacgggtattttacccgaagccgatttctattgccctattccctacgagcccttacacatcgtcaccgatcaggcattaaatgctgagattcaaaaaggcgaagagggccttttggatcgggtatttagattgatagtagaggaaatcaagtttgctgatccagactggagtcaacgcatagccttagagagcctgaatgtcgattcctttgctcaagcctggtttgccgagcgcaaacaacgcgacccatttgactgggcagaaaaaaatctccaggaagtcgaacgcaataaacgagaaaaacatactgttccctggcgttatgtcattctgcgcctgcatgaagccgtacaggaaattgttccacatctgaatgaacacgaccataaacggttcagtaaaggccttgcccgggttttcatcgataattatgcggcaatcccttcagagtctattcgtcgcctacttgccttacgtgaagcgggaatcattcatattctcgccctcggtgaagactacaaaatggaaattaatgagtcgcgcaccgtcctgaaaacggaagacaacagctactcgtttgacgtttttatcgatgcccgcgggcagcgtccgcttaaagtgaaagatattcctttccatggactacgcgaacaattacagaaaacaggggatgaaatccctgatgttggtgaagattatacgttacagcaacccgaagatattcgtgggcgcgtagcgttcggcgcgttgccctggttaatgcacgaccagcctttcgttcagggacttacggcatgtgcagaaattggtgaggcgatggctcgggcggtcgtaaaacctgcctcccgtgcacgtcggcgtctttcgtttgattaaaggtaaagctatcagcactcaacaaactgatgctgttcattaagacgatagcggactccggctcgaatattgttttcaccttcaatggcgacggcgaagcgaactctttcgccgtcatgatataccagtgcggcgcttcctcctggcccgagaataattgagtcgaccacgcccgtgctcactaccgttgaattttcaccgctggcaatgatgtgtacattgtcgccactgttggcaattctggcgtttgcgccaaagctggcgatttgcaccaggtcaccattactggcgacatgacatcgttcacccaatgtacaaacgcgtactcgcattccggtattcgcaatccgactactatctccagcgctgcttatccgcgaagaattaccggttacagcaacccgtgcgcgttcaccggagctgccaatgtgactgttaaagccgacacttccaatccgcacgctataacccatactggcaatttgcgcggcatacccagcggttgcgattcgggcgttatcctcacaacagccgatgcgagcatgatcgtcgctgcgggcaaactgactgcaaaatggtatctctccggggtctgtggccagtttttgcatagaggaaacttcctgatgcgcgaagttttcatccgccagccattttttccacgcatactcaaccagactctccgcccagtccgtatatccttcctcaatcagtgcatgatgaatatcggcataactaccgccgcgtgggaaatggcgcaggaaccagcgatacatcaccgctccgatacgccattctcgcaggtctgctcgtgtaatgatcattcgttagtgccggtgatagccatcgaccatgcttttaaaggtttcgtgtggcgtacgccccgtggtgcaaagataaagatgaccgaagataaaaaagaggcttataaatgccagagcaaaatgcgcctgcaataaccagtatcttacgccaggaaacacatctcccacggcttgcggatagagacacaacagccccgtcaatagtaacaacggcagcaatccatacatgacaccaacataggcgacctgctgtaagggattaaatttagactgtgttgttgccggtaaaggatgttcttccccctgcataatgccaaacaaataaaatcgcgtttgttttgccgctcgttccagccacccctgacgacgaatgcgatagtggtgaccattatccccaacggcattgatcagcacaaagccgagccagcatgccagtaacaaaaatccgcaaacttcatgcaccgcaaccagacttttaaccgcagttgcgcccaccatcgcaaagtgatttatcagcccacttgccagcaacaatacaaagagtaacgcattcgaccagtgccataatctgaccgctttgctgtaaagataaaccttctcaccatgatcggtggctgatttcttcacgccacgagcacgaagcaaggcgtgcagccccagcaccaaccacatcccaaccagcaatactccggcaatgatcaaccacaccggccaaaattcgggagtgaactgtggcacatagttcgctaactggctctgaaactgttcagcatgttgcgacgggttcatacattttcctttttaatcaaatgttgaccgaaccggcgatacagatgcggtttcccggcaccaggtagctgatattgatagtatttattatcctgcaaccacgcctgaatttctgggctatcttcgcgaccaaagatcaatgcgtgttccggacaggcgctgacgcaaatgggcggaaagccttttgccagtcgggactcagcgcagaaatcacatttatctgccactttagtgacagggttaaggtagcgaacctggtacggacaagcgccaatgcaataactgcagccgatgcactgcgatttttctacccgcacgatcccctgctcatcacgccacgatgcccccgtcgggcatacgtcgatgcacggagcatcttcgcagtgctgacatgactggcgaaaaaagtgatactgcgtttcgttgtcgttatcggtgactggaatgtgtgctatcgataaacggcttccctgagtggggacgtggttagttttacggcatgcgcgggcgcaaatattacagccattgcaccgtgactcgtcatgaatcatggcataccgaacttccttttcttgcctcgtgttcgctaacagagaagacgcagaaccagtaaaaaagattactgttcccatccccagaacaaatttgcgtcgagtgaaggacatctgattatcccctaatgcagtggctgcaactgtccaccctatccatgacatctccctgaaatttcaggggttctgaaactgctctacctcgaaccattcgcataagccataagccttgccataggtcataaatcgctcgctaaacaagtacaacaccgccgtcgatgactccacctgccgtatatcggcatattcaggtgcaacatccatcgcggcgatcgcggcttcaatctgcgcttcctggaagtaatatggcgcttgcatcagcatggcgactttgtaaggacgaggatacgtctggcactcaaaacgaacggcgtgtgcaatggcgcgacaaatgtcctgctccacaacttgcaaagacatcgccgcgtagttttcactcatggcctgcgttgagtaatagtaatcatcctgacttcccgtcatacaagcgatatccgcgtagtctccgttctgcttaatgctttccagcaaaactgacagttcctcttctgcaaccgaatagggtggcgagagaaacacggcgcgcgccaccagctgcccagccgcagaatgctggcgaatgaactctgccaggatttcagccggttctggttcggttaccgtatcaacggggtgacgcatcccctgtaaccattgccgcttcgcctcgtcaacttcgctaactttcgctaacggcaattcatcccgatggttcatctcacccattccttacacaggcagtagattgtgtgctgccagatcggcggcaatatcttccagccccagacgctgcaatgtttcgcgggtcggacaaccaagctgtgggtcccagcccatttctttgtagaacatcgtgagcgaagcatgcatatcgtcacgatccattttgtccgtaccttcagtaaagaccgggatctgcggatccttgtcgaatacccaggaacagataagatcgtgttcattacgcatatctttggtttgcatcagttttaccgtgtaggcacgatgcaacgtaaagatacgctctgcagctaaatctaatttttcctgagtcatctcttcgccggtgatcgctttgaagaatttggcttcaagcgccagatcgccccggtaattacggcttttcagcggcgaaacggtcattggccagacccagttacacagggtgacggcgttatgcaaacagacccgcaacagcgaccacttagcatatttaatttttgcgtcattgattggcgtgtagtttttggtttcatcgtaggcatcttcagaaccaaaaagctctttcgccacttcacgttgcagtttcaatggcaagccggaaccaataaagttgatatgggtatgtgtcatgcagtcacggttgaacatacagttaacaatggaaccgacctgcgctgacgcttcattggcatggtgaaccggatagccaaacggcgaccagagtttatttttcgcgtagccccagtactcttcacccaaattccagcgttctgcgatggcatatgaaccatcagccaggtgactcagctcacccacacgatgcgccagacggtagtaaaaatctttaatgaaattaacgtcacccgcttccagttgatcccagtgaatttccgcatactcttcagcaggcagaacacgcttgaacacccctttgctgtaacaataagtaaagtcgcgatgcaactgcccgtagttacaccataggccgtagtcatcgaacaaattcagaccaaccaagttaccaatcacacggccatcgtctttatcttcaaaatctttcggaccgttcgggaagatggtggtatggacaaagttggctacacaagtgttaccacctgtgctgggcacgccaaactctttcacccgaggaatattcatttgggtcatacaacggatcgggcaagagtggcagccactcatttttactgtgtatttctctgccgccggacctaagtcaaaaacggatttataggtacgaaagccgaccgtgttctgattgcctggcggaatttcccccgtttcaatcggaccaccttcagccgcgccccaaaacagccctttacgtgctgtccaacgtgacttgggatctgaatactctgcccacgattgcggcgtacttggcacgacatggttgttattcgcaccaataagttcagtcatcatgtaatcgttgagacgcttcatctcctgacgatcggcaatgttgacccctttcgtcccttcaaccgcaatcgctttcaggtttttcgaacccataattgcgccagttcccgcaccgccgctgtggttacggctattcaacatgccagagagaggaacaaggttttccccagcctgaccaatagccgccacacaggtttccggactggtcaatcgacaaatttcttccgtcgttacgcgcgtcccttttccccataagaaatcggctttttccaggctaactttgtcatctttaatcttcagccataccggtgatttcgccttcccttcgataataatgacgtcgtatccagcgaatttcatttgcgctgcaaaaaagccacccatatgggcatcgacaactaaatttcctttggtaaaagtagaaagtgaggtgatatttacgcgagaactacagggggcaccagatccagttaatgggccggtagcaaagactaatttattcgcttcatcgaaaggtttcgtgcctggcggtacttcgtcatacataattttgtagccgaagcccatgccaccgacaaaacttttaaacttactggaatcttcgagggtaatatttcctgtcgtgagattgactcttaatatattacctgtccaaccgttagccatgattttttcctttgcaagattcacacagtaatatctttccactcgataatttttaacgcccctgttgggcaggcgtttgcgcattcaccgcataacacacatttcgaggattttttactttcggtatttacggtggccatcatccacgggcatgccgtagtacaggcgctacagccaatacagcgtttatgatcgacggtaatacagccttctttctgctgccaggtaatcgcaccaatcgggcagacgttcatgcattgcggctctttgcattgacggcaggtgtccgcggtatagttgagatcgccatacaggccgccgccagagccaaccccgttgtcgccaaagaaataattgcgatggattttgatacgggagaagaatgtccctactgagccatcgttgaagttggtacaagagatttcacagcggtggcaacccgtgcatcgcgctcgctgggtcaccagcacccctttgggggtatttatcaaccctactgtgccgctatcaatatcttcctgtttgcaacccaaaagtgacagtaacgcaggggcaattgttagaccagcaaggccttttcctgatatacgcaagaattctaatcacgttaagccaatatctaatagtggacgatcaaccgggttcatttatttcgcatcctcttcgcaaacacagtgctgacaattcagcagcctgatattaagcattcaactaatacgctgctgactctgtccccaacaccagatattttccctaacccgatagtgtatgagaaaagatttaacgccgataaactaatcctttatggttaggagaaaaaataatgtgattattctgagcccttaacattgatcgttatcaattaaaattacaaagcaagaaattataagtgaactgatatttattatcatttgaaataaatttaacttaagcgacaattatttgtgactttcattgcagaaaataaaaataacattatcgctataaattaaaatacataccgaaattcgtataatttcagcagttgttatttagaatgattaactggaccgcaactgaagcaagaatatcaggatgaagcttaccgcctcatcctgaatggtcattttaccagtgcgttaatgacggtttccatcgcctgcttttccagctcactgcgctgaatgcgtttattggctaatgctgtacgtaatacgcctgcgataacaatatgctttggttcctgccccagatcgcgcatttccagcacaactttaccgacaactctgcacatttctcggtacagttcatcctcttttgtccgatttcccattctttatacctatttatcatgccaactatcagcatatatcaatctaaccaattaaacaaaaatcaaacaaaatcagacaaataacgcgataaattattttaactgtagcaattgagcgatgatatatttatacaccggatgaactttcacttatcctcacactgacaacttcggcaccagacgttgcgcaaacagtgaagtttttgcgtaaccttttccctggaacgttaaatctttgataacaatttattgtctaacaagttgtatattttttgaaacgctgtttttgttttccttttggattaatttcagcgtataatgcgcgccaattgactcttgaatggtttcagcactttggactgtagaactcaacgactcaaaaacaggcactcacgttgggctgagacacaagcacacattcctctgcacgctttttcgatgtcacctatccttagagcgaggcaccaccactttcgtaataccggattcgctttccggcagtgcgcccagaaagcaagtttctcccatccttctcaacttaaagactaagactgtcatgaaaaagaccaaaattgtttgcaccatcggaccgaaaaccgaatctgaagagatgttagctaaaatgctggacgctggcatgaacgttatgcgtctgaacttctctcatggtgactatgcagaacacggtcagcgcattcagaatctgcgcaacgtgatgagcaaaactggtaaaaccgccgctatcctgcttgataccaaaggtccggaaatccgcaccatgaaactggaaggcggtaacgacgtttctctgaaagctggtcagacctttactttcaccactgataaatctgttatcggcaacagcgaaatggttgcggtaacgtatgaaggtttcactactgacctgtctgttggcaacaccgtactggttgacgatggtctgatcggtatggaagttaccgccattgaaggtaacaaagttatctgtaaagtgctgaacaacggtgacctgggcgaaaacaaaggtgtgaacctgcctggcgtttccattgctctgccagcactggctgaaaaagacaaacaggacctgatctttggttgcgaacaaggcgtagactttgttgctgcttcctttattcgtaagcgttctgacgttatcgaaatccgtgagcacctgaaagcgcacggcggcgaaaacatccacatcatctccaaaatcgaaaaccaggaaggcctcaacaacttcgacgaaatcctcgaagcctctgacggcatcatggttgcgcgtggcgacctgggtgtagaaatcccggtagaagaagttatcttcgcccagaagatgatgatcgaaaaatgtatccgtgcacgtaaagtcgttatcactgcgacccagatgctggattccatgatcaaaaacccacgcccgactcgcgcagaagccggtgacgttgcaaacgccatcctcgacggtactgatgcagtgatgctgtctggtgaatccgcaaaaggtaaatacccgctggaagcggtttctatcatggcgaccatctgcgaacgtaccgaccgcgtgatgaacagccgtctcgagttcaacaatgacaaccgtaaactgcgcattaccgaagcggtatgccgtggtgccgttgaaactgctgaaaaactggatgctccgctgatcgtggttgctactcagggaggtaaatctgctcgcgcagtacgtaaatacttcccggatgccaccatcctggcactgaccaccaacgaaaaaacggctcatcagttggtactgagcaaaggcgttgtgccgcagctggttaaagagatcacttctactgatgatttctaccgtctgggtaaagaactggctctgcagagcggtctggcacacaaaggtgacgttgtagttatggtttctggtgcactggtaccgagcggcactactaacaccgcatctgttcacgtcctgtaatattgcttttgtgaattaatttgtatatcgaagcgccctgatgggcgctttttttatttaatcgataaccagaagcaataaaaaatcaaatcggatttcactatataatctcactttatctaagatgaatccgatggaagcatcctgttttctctcaatttttttatctaaaacccagcgttcgatgcttctttgagcgaacgatcaaaaataagtgccttcccatcaaaaaaatattctcaacataaaaaactttgtgtaatacttgtaacgctacatggagattaactcaatctagagggtattaataatgaaagctactaaactggtactgggcgcggtaatcctgggttctactctgctggcaggttgctccagcaacgctaaaatcgatcagctgtcttctgacgttcagactctgaacgctaaagttgaccagctgagcaacgacgtgaacgcaatgcgttccgacgttcaggctgctaaagatgacgcagctcgtgctaaccagcgtctggacaacatggctactaaataccgcaagtaatagtacctgtgaagtgaaaaatggcgcacattgtgcgccattttttttgtctgccgtttaccgctactgcgtcgcgcgtaacatattcccttgctctggttcaccattctgcgctgactctactgaaggcgcattgctggctgcgggagttgctccactgctcaccgaaaccggataccctgcccgacgatacaacgctttatcgactaacttctgatctacagccttattgtctttaaattgcgtaaagcctgctggcagtgtgtatggcattgtctgaacgttttgctgttcttctgctgatagtggtcgatgtacttcaacataacgcatcccgttaggttccacggaatatttcaccggttcgttgatcactttcaccggcgttcccgtccgcacgctggagaacaaggctttaatatccggtgcattcatgcgaatacaccctgaactgacgcgcaaaccaacgctgtccggcgcactggtgccatgaatgaggtattcgccattaccatgcgcgaggcgcagtgcgtaacgtcctagcgggttatttggtccggcaggaacgactggcggtaatttaatgccacgctccagcgaacgttgacgaatgcctgccgtaggcgtccaggttgggttagggattttctgccccacacgcgtttccatcaccggcgtttccagcccctgcaagccaatacctatcggataaacctgcacgatattttctcccggcggataataataaaggcgcagctctgcaaggttaacgataatcccctgacgcggcgcatcaggtaataacagttgcgaaggaatagttatcgtcgtaccgggctttggcaccggggcgatagtgttattggcttcaaggatcaacattgccgcagtatcaaaacgtcgggcaatagcctgaaggtttttatccccttcttgcaccgtatacgtttgattttgcccaaccagtcggcttccggttggtggtagcggataatcaaccgcccaggcagcctggatggcgctaaaagcgccgataagcgtgagtgtaagcaaagacgcgcgtttcattgtaaacctcctgtatttgccggagactcacgctgaaacgtcggatggcgcttatgttcacctgaaaccaaaacactcctgtgcaggtcagtgtaaacattgaccatccggcaatgtgagccaaccggatgaaagctgtccctttagtttagctaagtgcagcggctttggcgcgaattgcgcgaatcatcgcttccagaccttgtgaacgagatggggtgagatgttgggtgagcgccattttttcaaaccacggacgcacatcgaaattgacaatatcctgcggcgtcatctgatcgtagagaataaagacgaccgcaataagccctttcacaatcgccgcatcgctgtcgccctgcaattcaataattccctgcgcattctggcgcatgacaatccacacctgactctggcagccctgaatgctattttgtgggcttcggtcttcgtcgcgtaattctggcagacgctggcccagctcaataatgtagagatatttctcttcccagttggtacagcgtaaaaaattacgcagcaatttttctttatccggcaatacagccatagtgcctccctgttatcccagcagacggtgaatacgttgcaatccggtcaccagacgatccacttcttcatgggtgttatacatggccagcgacgcccgacacatcgcagggacgttgtaataggccattaatggcatagcgcagtgatgtccggtacgcacagcaatgccgtaattatcgagaaaactgccaacatcataggcgtggtgtttaccgagattaaaagcaataacgccaagcctgttttgtgggccatagagagtgagatccggtacagattccagctgtgatagcgcgtagtgcatcagattctgttcatactcggctatgttattaagccccagcgccgaaacatactccagcgccgcgccaagaccaatgatgcccccggtattgggtgtaccggcttcaaaccgccatggtgctttggtccaggtagtgccttcactcaggctgacggtggcgatcatagaaccgcccccttcccacggcggcatctcctgcaacaaggcttctttcacataaagaatgccaattccggtggggccatacagtttatgcccggaaaacacgtaaaaatcgcaatccagcgcctgaacatccaccggatgatgcatcaccgcctgagcgccatccaccagcacttttgcgccatgctggtgcgcaagcgtgatcatttccgccagcggattttctgttcccagcacgttggagacatgagtaattgccagcaggcgagttttctcatcaaacagcgtaggcagcgtctccagttgcagcgtaccgtcggggttgagagggatcacacgcagctctgcaccaacgcgtgcgcaaagcatctgccaggggacaatgttagcgtggtgctccatctgactgatgatgatgttatcgcccgcccgcacattgctgttgccccagctattggcgaccagattgatcccttccgtcgtgccgcggacgaacaccagctcttccgccgaacgggcattaataaacagcgatgcccgcttgcgcacgttctccattttctcggtcgcctgagcgcttaaggtatgaataccgcgatgcaccgccgcgtagccatgacgataaaactcggcctcggcgtcaatcacctggcccggtttctgtgcactggcggcgctgtcgagataagccagcggcaaaccgtttacctcacgcgaaagcaccggaaagtcggcccgcactttgtcgacggaaaaagtcatcttgcacctcctggcagccgttgaccgattcgggccagcacctgctgtttaagcccctcatcacgcagtgcttccgtcagttcggcagcaaaggcgtaaatgatcatctgctgggcatcctgctgattgatcccgcgcgagcgcagatagaacatctgttcatcatcaatacgccccaccgtcgcgccgtggctgcatttcacatcatctgcatagatttccagctgcggttttgtatccacttccgccagtttgcccatcagcagattattgttggtcatctgaccatccgttttgatggcgtgctgcgcgacgttgatcaaaccgttaaataccgcgcggcctttgtcgctgacgatagttttgtgcaactgtcggctgttacaaaaacctttattgtgttccagccaggtacgggtatcacacacctcgtttttcaccggcatcgccaggctattgatccgcagcgtgctgttttcgccattgagttgcgtactggtgttgtgtcgtaacactgcgccacccagcaggaaactgtggctaaatgcggtggcatcctcagccagcaacaaatcgttatgagcaaagtggtgactgagcgggttttcaaacgccagcttgatatgctgcaagtgggcattcgctgcgacgttgatagtgaaccgtgccccggtaaaatgacgagcatcattcaggctgacaaaatgttcgatcaccgttgcttcggcaccttccgccagatccagatgatgtcggtaatgggcagtgttcacctcttcacctgccacgccctgggtgatatgcattaacagcaatggctttgccggccgttgaccgcgcttcacggcgatatgcgtcacgctttgtgccaggctttccgtcaaatgcagaaacacttccgcctgaatagcgtcgggtaaaccctgacggtcgtcgttaatgctcacttcatatccgctgccttcagttgcatcgctcagtgcgggcacgtaacgcccatcgacaaacaccagccgcacggagtctaacgttaacgctaaggcatcacgctgctgtggggatatctctcccgcaatgctgacaaactggctattggtcagcccttccagcggcgtatatttccagttttcatgtttacgtgtcggcagtccggtacgcagcaattgttgtaaatgctgctgtgcttgcggagagcgtttcgctccgtcagcttcaaacaagtgatgccactgttgcagcgagttactgctgttcggtaagccagccataaccctgctcctccagttgtttgaccaacgtgaaatcgccggatttcacaattcgtccctgatacagcacatggacgtaatcaggcttgatgtagtcgagaatgcgttggtagtgcgtaacaatgatgaatgaacgcttgccgtcacgcagcgagttcacgccatcggcaaccacttttaatgcgtcaatatccagcccggagtctgactcatcaagaatgcataactccggttccagcaccgccatttgcaaaatatcgttgcgctttttctcgccgccggaaaaaccaacgtttaccgaacgggttaataaatcttccggcatcttcaggagagcgattttctcttccatcaaatcctgaaaatcaaagcggtcgagcgtttcctggccgcgatagctgcgcaccgcattaagtgccgtttgcaggaaaaactggttactgacgccgggaatttccaccggatactggaaggccataaagatgccttcgcccgcgcgatcttccggcgacagcgcaagcaaatctttgcctttgaactcaaccgtgccgcccgtcacttcataatcttctcgcccggcaagcgttgccgataaggtacttttgcccgaaccgtttggccccataatggcgtgaacttcgccgggatgaacgtcgaggcttaatccgcgcaggatagctttatcttccacgctgacgtgtaaatctttaatacttaacatgtttattccttatccgacgctgtgttcaagactgatggcgaggagtttttgtgcttcaacggcaaattccaacggcagctccgagaacacgtctttgcagaaaccgttaacaatcatcgagatggcgtcttcttcgctgatcccgcgttgcaggcagtaaaacagttgatcttcaccaatacgtgatgtcgttgcctcgtgttccagttgcgcactattgttacgacactcaacatacgggaaggtatgcgccccacaattagcgccaatcagcattgagtcgcactgagtgaaattgcgcgcattggttgccgtcggcatgattttcactaagccgcgataactgttctgactatgtccggcagagatccctttcgagataatggtcgatttggtgtttttaccgatgtggatcatcttggtgccggtatccgcttgctgatgaccgctggtcagcgccactgagtaaaactcaccaatggagttatcgccgcgcaaaatgcagctgggatatttccacgtaatcgctgacccggtttctgattgcgtccatgacattttgctgttttcgccttcgcacaaagcacgcttggtgacgaagttgagaataccgccggtgttgttatcgccaggaaaccagttttgtaccgtggaatatttcacctcggcgtttttatggatgatgacttccaccactgccgcgtgtaactgatagctgtcacgcaccggagcggaacagccttcaatgtagctgacgtagctgtcttcgtcggccaccagaatggtgcgctcaaactgcccggttttttctgcgttaatgcgaaaataggtggaaagttccatcgggcagcgcacgcctttaggcacataaataaacgtaccgtcagaggctaccgccgcattaagcgcggcaaagaagttgtcattccccggcaccacggtgccgagatatttacgcaccagttccgggtgatcgtggatcgcctcaccaaaggaacagaaaataattccctgctccgccagtttttcgcgataagtagtggcaaccgaaactgagtcgaaaatggcatccaccgccacctctttgccttcccgcacgggaacgcccaactgctcaaacgccgcctccacctctttacttaaaaaggcgttcgcgccagtttgctgcaccgcgccaggttcagacgcgcaagtgtcgtcacaattaccgcacgatggtgctgagtagtagctgtaatcctgataattcagcttgtcgtagtgcgctttcaaccagtgcggttcttccatctccagccatgcgcgataggcgtttagacgaaactccagcatccactccggctcattacgcttcgccgaaattgcgcgcaccacctcttcgtttatcccctttgccagctcatcggtggctaactgggtgaagaatccttctttataattcagcgggccgccggtccaggttttgacatcgtcagttgcttcagtattacgagacatagtaccgcctataccccaaagctttcgccacagccacattcattctgggctttagggttgtgaaatttgaatatctgattaagtccttcacgaacgaaatcgacttccgtgccatcaataaacggcatcgcttgcagcgggacaaacagcttcgcgccgtcgtgttcaaacagcagatcgtctttgtccggctcgctaacactgtcgagcacatagccaaagcccgcgcagcccgtttgcttcacgcctaagcgcacgccgaccatacccggctgctttgccaccagctcacggatgtgtatcgccgctgcgggtgtcagcgttaagccttgccaggcgaaatcttgtgggttaaaggttcctgaatgcatgtccatcgatttacctcacttcatcgctttcagcgtataacagcatgttagtgataatgattatcagttcaacccagcaaacgcaggggctttaccgtaaaacatgctttttgcctgcttttaataagcatagaccctgatgtgtgggttaacaggcacgctaagaattaggtatctcattgttagataatggttattatctaaggagcattaaggctgtgatgaaaaagaaaaagttgtattgaaaatgactatttaagagataggtaaaaaagtgcagcgttcagaaataagaaaacccttaagtctgtgcgacacaggcttaagggtttctaccccatccggcgcttatctccggcactctcagtggcttagctcttgaaggggcgataagaataatctcataaagctaacccgccgttttaacacaaactgcgattagtattatttttgaacaatatcaggcggtagataagcagtattaagaaggtcatcgaacctggacggaggttaatccaggtcgatttggcgaacttgcggcattaagtcaggatcaatgcacgcccagacgccaggcaaagtagatttcttcttttaattcagcagaagagagagtaagcaggtcagcaaattcaagttctagttgtttcagacgtttgagatattgggcaggtgaaagattgctctggtcacggcgtaaaaattcaatggccagctgggtgggatcaagttgagtagacatagcatcctcgcttttagacaagacctgcacagtataccaccgtttactgtgcagataatgaccaaaagcaatatgcgtcacacttttctggtgacaacgtcacaaaatggcggtcgtcaatcgtgacgaacagcacaaacgccctttctcatcgaagatttcaatctgccagacctggtgacgcgaaccgagatgcaacggtttgcatacgccgcgcacccgcccttctcgtgccgagcggacgtggttagcattgatttccagaccaaccactttttgctcaccttcggtacataaataaccggcaacggaaccgatactttcggccagtaccacggatgctcctccatgcagcaacccgaaaggctgctttgtccgcgagtctactggcattgtcgcttcaagggtgtcatcaccaatatgttcaaagcgaatatccaggaaccccaccatgtttccttcacccatagcattcagtgcttccagggtgattttccgtttccatatcatttaataatctccagtaaagcctgcacaggatggcgtacccccgtgccttcaacccgttttacctggctacggcaggaatatccggtcgccagacagcggttacgcggcagtcgctgcatagcctgatgccaggataactcatagatcccgagcgaattttcatggtttttcgcttcatgtccgtaagtccctgccatgccgcagcaacccacgctgacattttccagtttcgcgccaaaacgggcaaatatcgcggcccattgtgctggcgcacccggcaaggcggtaacttcggtacagtgaccaaagaaataccatgattcaccgctgactgtagccactggctgtgactcaagtgcgcttgccagccattcattcgccagtaagacgttaaactcgccacgctcctcgcccagcgccagtttatattcatcgcgataacaaagtaccagcgccggatcgacgcccaccattggcatacccagcttcgccatacggttgaggaaatccgccgtctttttcgccgtcttcgcaaaacgattaagaaaacctttaatatgctgggctttgccatttggcgaaaatggcagtaacacaggctggaaacctaatttttcgaccagacggacaaaatccgccaccacttgcgcatcgtaatagctggtaaaggggtcctgcaccaccaacactgtgcgcgctttctgctctgcattgagagattcaagctgttccagcgtcatgtttgccgagcgatgccccaccatttgttgttgtagcgaggggaccgacagcagcggcaaatcaaccatgccgatatgtttttccgagagtttgcgcaccagcggctggttaatgaagaagttaaaggttttcggcgcgcgtgccatcagcggcgcgtagctctcgaccgtagcgacgaggtggtcgcgcagcgggcgtaaataacgggtgtgatagagctgcagaaaacgagagcgaaactccggcacatcaattttgatggggcactgggtcgaacacgctttacaggccagacagcccgacatcgcctctttgacttcgtgtgagaagtcatattcgcctttattcgcatgccagctattgcgcgtgcgggcaattaacgtccgcaaactgacgccggattcaggcagttcttgttccagtttgagtggatcaacgccgcgatccgccaacaaacgcagccattcacgcaccagcgttgcgcgccctttcggtgaatgaatccggttctgggtgatcttcatcgacggacacatcggactacgggcatcaaagttgaagcataaaccgttgccgttaaactccatcgcaccgcgccactgctggcgtaccgcaatggggatctgccgatcgaatgtaccgcgcttcaccgcgtccactttcatcatcggcgcatcgagaccttctggcgggcaaatcttccctgggttgagtcggttatgcgggtcaaatgccgctttcactttgcgcagttctgcaaaaagttcctcaccgaaaaacgccgggctgtattcagcgcgaaaacctttgccgtgctcgccccacaacaaaccaccgtatttcgcagtcagcgccaccacgtcatcagagatttgcttcatcaaaatctcttgttgaggatcgcacatatccagcgctggacggacgtgcaagacacctgcgtcgacgtgaccgaacataccgtagcttaagccgtggctgtcgagcagcgcgcgaaattcagcaatataatccgccaggtgttccggcggtacgcaggtatcctcagcaaacggaattggcttagcggcacctttggcattgccaagcagaccaacggcttttttgcgcattgcatagatacgttcaacccccgccagctcacggcacacctgccagccgatgacacctgcttgatgactggcgatcagctcatccaaccgcgcacagagtgcatttacccgctcatcaatcagcgcctcatcatcaccagcaaattccacaatgttcagcccgagcatctcttggtcaggcacatcggtaatcaactcgctgacggaatgccagacaatatcttcccgcgccagattcagcacttttgagtccaccgtctctaccgaaagcgcccgcgcctcaaccataaacggcgcgttacgcagcgcagagtcaaaagagtcatatttgacgttcaccagacggcgcactttaggcaagcgtgtaatatccagccgcgcttcggtaataaaggccagcgtcccttctgaacccgtcagaatgcgcgtcaggtcgaactcggtcatctcatcgttaaagacatgacgcagatcgtaaccggtaagaaagcggttaagtttggggaagttgtcgataattaactggcgttgctgacggcaacgttgataaaccgtgttataaattcgcccgattgtggtattggatttacccagcgtttccgccaattcgacgggtaaaggttgcgtatcgagaatatcgccccccaacaacaccgcgcgtacgccaagtacgtgatctgacgttttgccatagaccagcgatccctgaccggatgcatcggtattgatcatcccaccgagcgttgcccggttgctggtcgaaagttccggcgcaaaaaagtagccgaacggtttcaggtactgattgagttgatcttttatcaccccggcctcaacgcgcacccagccctcttcagggttaatttcgatgatgcggttcatatggcgggacatatcaacaataatcccctggttgagcgcctgaccgttagtgccggtgccgccgccgcggggggtaaagatcagcgatgaatagcgttcctgcgcggcaagacgggcgatcagcgccacatctgcggttgaacgcggaaataccaccgcatcagggagaagttggtaaatactgttgtcggtcgacattgtcagacgatcggcataacttgtcgccgtatcgccggtaaaaccttgttgctccagctcttgcaaaaaattaagcaccagttgaacgacgccgggtgcctgggaaatctgtggaatcattatattgaccctttcctgcggtctgtgatgtaggtcgatacactattctttcaggctgctgcaatagcgcactgaaaggtgatgtttgtttactctatggatttcgtgttgcaggaaggcggcaagcgagtgaactccaggagcttacaatagtaagtgactggggtgaacgaacgtagccgcagcacatgcaacttgaaatacgacgagtaaatcgtttgcgtgttgcctgagttgttgtaccacatttttttctaacacgcccatcagaattaagggcagaatcggcctgttaaaaaccgctgaaattgctcatcattatgcaggtgagtttcgcgtgttcacgtcgcgtcgacgatttgacgcacaaaaaaggtgaaaagtagttatggtaaatgttcgtcagcccagggatgtcgcacaaattctgctttcggtgctgtttttagccatcatgattgtggcatgtctgtggattgttcaaccctttattctcggctttgcatgggccggtacggtggttatcgccacctggccggtattgttacgtttgcaaaagatcatgtttggccgccgctctctcgccgttctggtgatgacgctgttattagtgatggtgtttatcatccctattgctttgctggttaacagtatcgtcgacggcagcggcccgctaattaaagccatttccagcggtgacatgacgttacccgatctggcgtggcttaataccattccggtgattggcgcgaagctgtatgcaggctggcacaacttgctggatatgggggggacggcgatcatggcgaaagtccgcccttatattggcaccaccaccacctggttcgttgggcaggcggcgcatatcgggcgctttatggtgcattgtgcgctgatgcttctcttcagtgccctgctgtactggcgcggtgaacaggtggcacaaggcattcgccattttgcaacccgtctggcaggcgttcgcggagatgccgccgtgctgctggcggcacaggctatccgcgcggtggcgctgggtgtggtggtgacggcgttagtacaggcagtgcttggcggtatcggcctcgccgtatccggcgtaccttatgcaacgttgctaacggtgttaatgatcctctcctgccttgttcagcttggcccgttgccggtactgattccggcgattatctggctctactggactggcgataccacctggggaacggtattgttagtgtggagcggtgtggttggcacgctggataacgtcatccgcccaatgttaattcgcatgggtgccgatttaccgctgatcctgattctctctggcgttattggtggtttgattgctttcgggatgatcggtctgtttattggtccggttctgttagccgtttcctggcgtctgtttgccgcgtgggtggaagaagtcccgccgccgacggaccaaccggaagaaattctcgaagaacttggcgaaatcgagaaaccgaataagtaatttctcatcaggcggctctgccgcctgattgttaaccaccgctaattgatatttgcttgctcttccccatattttcctgcttaccgccattcagctggtagtacctgtcgcaaattctttacagtttttaaactaatgagacgaatctgatcgacgcaaaaagtccgtatgcctactattagctcacggttataaatcaacatattgatttataagcatggaaatcccctgagtgaaacaacgaattgctgtgtgtagtctttgcccatctcccacgatgggcttttttttaacatttttccgcttcgctacctcgcccctcactctttccaataatgttgcacaagatactgtgactctcttcaagccgtcagcaggctgataatgttatttatattttattgtttatttcatgcagccattacacgatgaacgcttatgaactccaggcactccgccatatttttgccatgactattgatgaatgcgcgacctggattgcccagaccggtgacagtgaaagctggcgtcagtgggaaaatggcaagtgtgccattcctgatcgtgtagtcgagcaactgttggctatgcgtcagcaaagaaaaaaacatcttcatgccatcatagagaaaataaataaccgcatcggcaacaacaccatgcgttttttccccgacttaaccgcatttcaacgagtctaccctgatggcaattttattgactggaagatctatcaatcggtagctgctgaattatatgcacacgatctggagcggctttgttaatttttccacagaaaggaattgtcgttgttacaacaataatgaacggatgctgacacaacatcgcttcactttttaaagcacctttgctaagtagaacctatgaaaaatccctatttccctaccgcacttgggttgtattttaattacctggtgcatggtatgggcgtcattttgatgagcctgaatatggcctcgctggagacgctttggcagactaatgccgcaggcgtctcaatagttatctcatcgctgggtattggtcgattaagtgtcttgctttttgcaggattattatccgatcgctttggtcgccgcccttttatcatgctcggaatgtgctgctatatggccttcttttttggcatcctgcacaccaataacatcattatcgcttatggtttgggctttctggcgggaatggcaaacagttttctcgatgcaggcacctatcccagtttgatggaagcttttccacgctcaccgggtacagccaatattttaattaaagcatttgtttccagcgggcaatttttattaccgctaatcatcagcctgttagtgtgggctgaactgtggttcggctggtcctttatgattgctgcaggcattatgtttattaacgctctgtttttataccgttgtacgttcccaccccatccgggtcgtcgcttacctgtcataaagaaaaccaccagctctacggaacatcgctgctcaataatcgatttagccagttataccttatatggttatatctcaatggcaaccttttatctggttagccagtggctggcacagtacggacaatttgttgcaggcatgtcatacactatgtcgatcaaactactcagtatctacaccgtgggttcgctgctttgtgtatttatcaccgctccactcattcgtaataccgttcgcccaacaacattactgatgctgtacacctttatctcatttattgctctgtttgccgtctgtctgcatcccacattttatgtggtgataatatttgcttttgtcattggttttacctctgctggaggtgttgtgcaaattggcctgacattaatggctgaacgtttcccctacgctaaaggtaaagctacagggatctattacagtgcgggcagtattgcgacctttactattccgttgattacggctcatctgtcccaaagaagtattgccgatattatgtggttcgataccgccatcgctgccatcggctttttactggcactgtttatcggcttacgcagccgcaaagaaacgtggcatcactcgctaaaggaaaatgtcgctccgggtgggtaatgcaatattcttttcaggtcatgcaagatcttacggataaataactctttctgcgctgactaaggaaaatcgcgatcaaaaacaaactatgacatgcaatattcctggaaacataaactttatgccatgtacccagggaaaatcatcttcagtatagtaattatgtaaaccgtcggagaacaatacgtacggtaacgaaattatctttcagcaaggagctgtgaaaatgtctcaaaataaggctttcagcacgccatttatcctggctgttctttgtatttacttcagctatttcctgcacggcattagtgttattacgcttgcccaaaatatgtcatctctggcggaaaagttttccactgacaacgcgggcattgcctatttaatttccggtatcggtttgggacgattgatcagtattttattcttcggtgtgatctccgataagtttggtcgtcgggcggtgatattaatggcagtaataatgtatctgctattcttctttggtattcccgcttgcccgaatttaactctcgcctactgtctggcagtgtgcgtaggtatcgctaactcagcgctggatacgggtggctaccctgcgctcatggaatgctttccgaaagcctctggttcggcggtcatactggttaaagcgatggtgtcattcggacaaatgttctacccaatgctggtgagctatatgttgctcaataacatctggtacggctatgggctgattattccaggcatcctatttgtactgatcacgttgatgctgttgaaaagcaaattccccagccagttggtggacgccagcgtagctaatgaattaccgcaaatgaacagcaaaccgttagtctggctggaaggtgtttcatcggtactgttcggtgtagccgcattctcgaccttttatgtgattgtggtatggatgcccaaatatgcgatggcttttgctggtatgtcagaagctgaggcattaaaaaccatctcttattacagtatgggctcattagtctgtgtctttatttttgccgcactactgaaaaaaatggtccggcccatctgggctaatgtatttaactctgcactggcaacaataacagcagccattatctacctgtacccttctccactggtgtgcaatgccggagcctttgttatcggtttctcagcagctggcggcattttacagctcggcgtttcggtcatgtcagagttttttcccaaaagcaaagccaaagtcaccagtatttatatgatgatgggtggactggctaactttgttattccactgattaccggttatctgtcgaacatcggcctgcaatatatcattgttctcgattttactttcgcgctgctggccctgattaccgcaattattgtttttatccgctattaccgcgttttcattattcctgaaaatgatgtgcggtttggcgagcgtaaattttgcacccggttaaacacaattaagcatagaggttaaaggagttaattatggatgttaccgcaaaatacgaattgattgggttgatggcctatcctatccgccacagtttatcgcccgaaatgcagaatcaagccttagaaaaagcgggattgccatttacctatatggccttcgaagtggataacgatagctttcctggagcaattgaaggattaaaagccctcaaaatgcgcggaactggtgtatcgatgccgaacaaacaactggcgtgtgaatatgttgatgaattaacaccagctgccaaactggtgggggccatcaacaccatcgttaatgatgatggctatctgcgtggctataacaccgacggcacgggccatattcgcgccattaaagagagcggttttgatatcaaaggcaaaacgatggtgctgttaggggccggtggtgcctcaacggcaattggcgcgcagggggcaattgaaggtttaaaagaaattaaactctttaaccgtcgggatgagttcttcgataaagccctcgccttcgcgcagcgggttaatgaaaacaccgattgtgtcgtcacggtcaccgatctcgccgatcagcaagcctttgctgaagccctggcttccgccgacattttaaccaatggcacaaaagtgggtatgaaaccccttgagaatgaatcattggttaatgatatcagtctgttacatccgggacttctggtcactgaatgcgtgtataacccgcatatgacgaagttattgcagcaggcgcaacaagctggttgcaaaacgattgatggatacggcatgttgttgtggcaaggggctgaacagttcacattatggactggcaaagatttccctctggaatatgttaaacaggtcatggggttcggtgcctgacaggctgaccgcgtgcagaaagggtaaaaaatgaaaaccgtaactgtaaaagatctcgtcattggtacgggcgcacctaaaatcatcgtctcgctgatggcgaaagatatcgccagcgtgaaatccgaagctctcgcctatcgtgaagcggactttgatattctggaatggcgtgtggaccactatgccgacctctccaatgtggagtctgtcatggcggcagcaaaaattctccgtgagaccatgccagaaaaaccgctgctgtttaccttccgcagtgccaaagaaggcggcgagcaggcgatttccaccgaggcttatattgcactcaatcgtgcagccatcgacagcggcctggttgatatgatcgatctggagttatttaccggcgatgatcaggttaaagaaaccgtcgcctacgcccacgcgcatgatgtgaaagttgtcatgtccaaccatgacttccataaaacgccggaagccgaagaaatcattgcccgtctgcgcaaaatgcaatccttcgacgccgatattcctaagattgcgctgatgccgcaaagtaccagcgatgtgctgacgttgcttgccgcgaccctggagatgcaggagcagtatgccgatcgtccaattatcacgatgtcgatggcaaaaactggcgtaatttctcgtctggctggtgaagtatttggctcggcggcaacttttggtgcggtaaaaaaagcgtctgcgccagggcaaatctcggtaaatgatttgcgcacggtattaactattttacaccaggcataagcaataatatttcggcgggaacaccctccccgccgaactaaaaaatatattcaatcgtatttaataaaaatatttcgtgagtctctgtgcgctaattctccatttggcgtagggaaaatcacatctgaatcaggaattaacaatgaaacctgtaaaaccacctcgtattaatggacgagtgccggtcctgtcggcacaggaagcggtgaattatattcccgacgaagcaacactttgtgtgttaggcgctggcggcggtattctggaagccaccacgttaattactgctcttgctgataaatataaacagactcaaacaccacgtaatttatcgattattagtccaacagggcttggcgatcgcgccgaccgtggtattagtcctctggcgcaagaaggtctggtgaaatgggcattatgtggtcactggggacaatcgccgcgtatttctgaactcgcagaacaaaataaaattattgcttataactacccacaaggtgtacttacacaaaccttacgcgccgccgcagcccaccagcctggtattattagtgatattggcatcgggacatttgtcgatccacgccagcaaggcggcaaactgaatgaagtcactaaagaagacctgattaaactggtcgagtttgataacaaagaatatctctattacaaagcgattgcgccagatatcgccttcattcgcgctaccacctgcgacagcgaaggctacgccacttttgaagatgaggtgatgtatctcgacgcattggttattgcccaggcggtgcacaataacggcggtattgtgatgatgcaggtgcagaaaatggttaagaaagccacgctgcatcctaaatctgtccgtattccgggttatctggtggatattgtggtggtcgatccggatcaaacccaactgtatggcggtgcaccggttaaccgctttatttctggtgacttcacccttgatgacagtaccaaacttagcctgcccctaaaccaacgtaaattagttgcgcggcgcgcattattcgaaatgcgtaaaggcgcggtggggaatgtcggcgtcggtattgctgacggcattggcctggtcgcccgagatgaaggttgtgctgatgactttattctgacggtagaaacaggtccgattggcggaattacttcacaggggatcgcctttggcgcgaacgtgaatacccgtgccattctggatatgacgtcccagtttgatttttatcacggtggcggtctggatgtttgttatttgagttttgctgaagtcgaccagcacggtaacgtcggcgtgcataaattcaatggtaaaatcatgggcaccggtggatttattgatatcagtgccacttcgaagaaaatcattttctgcggcacattaactgcgggcagtttaaaaacagaaattaccgacggcaaattaaatatcgtccaggaaggacgggtgaagaaatttattcgggaactaccggaaattactttcagcggaaaaatcgctctcgagcgagggctggatgttcgttatatcactgagcgcgcagtattcacgctgaaagaagacggcctgcatttaatcgaaatcgcccctggcgtcgatttacaaaaagatattctcgacaaaatggatttcaccccagtgatttcgccagaactcaaactgatggacgaaagattatttatcgatgcggcgatgggttttgtcctgcctgaagcggctcattaacaggagtataatgatggatttttctttaactgaagaacaagaactgctgctggccagtattcgcgaactgattacgactaactttccggaagagtatttccgcacctgcgatcaaaacgggacatatccgcgtgagtttatgcgggcgctggcggataacggtatttccatgcttggcgtgccggaagaatttggtggtatccctgcggattacgtcacccaaatgctggcgctgatggaagtgtcaaaatgcggtgctccggcatttttaattaccaacggtcaatgtattcacagtatgcgccgtttcggttctgcagagcagctacgtaaaacggcagaaagcaccctggaaaccggcgaccccgcctatgccctggcgttgacggaaccaggtgctggctcagataacaacagtgccaccaccagttacacgcgtaaaaacggcaaggtttacatcaacggacagaaaacctttattaccggtgcgaaagagtacccgtatatgctggtgttggcgcgcgatccgcaaccgaaagatcccaaaaaagccttcaccctgtggtgggtcgactccagtaagcccggcattaagattaacccgctgcataaaatcggctggcatatgctcagcacctgcgaagtctatctcgacaacgtggaagttgaagagagcgacatggtgggcgaagaaggaatgggtttcctcaatgtgatgtacaactttgagatggagcgcctgatcaacgccgcgcgcagcaccggctttgccgaatgcgcctttgaagatgccgcccgctatgccaaccaacgtatcgcttttggtaagcccattggtcataaccagatgatccaggaaaaactggcgctgatggcgattaagattgacaacatgcgcaacatggtgctgaaagtggcatggcaagccgatcagcatcagtcactgcgcaccagcgcggcgctggcaaaactgtattgcgcacgtaccgcaatggaagtcattgatgatgcgattcaaatcatgggcggtctgggctataccgatgaagcgcgcgtctcccgcttctggcgtgatgtccgttgtgaacgtatcggcggcggtacagacgaaattatgatttacgtagcaggtcggcagatcctgaaagactatcagaacaaataatctgcaggcggcgcagcttcttaacaaactgcgccgccagatttatccaacaagacttaccggttgaggaaattcagataggatttcttgttccgcaaaacagtttttaaattgcctgcggtaatcgctgggtgaacagccgacatggcgcaaaaacagtttgccaaagtgatcgacattttcataacccacacgccaggagatctctgcctgtgataattcagtattagtgagtaaccatttcgcttccgtcatacgccgttgaataacatagttaattggggaaatacgatactctttggtaaattcatggcaaatataactgacgctggcacgaaattttttcgataactgttctaaagtgattttttcgcgataattattattcagatagaaaagaatatcttttatcagaacatcttttttaatatacccctgctccgaacgataagcatttttaaagttttcgtagtaaagaattgctaatgtataggcaaatgcatcccataacgaagatgtttggctatttttactttgcggcaaaatcacacttagctcattaaataaggttttaatgacttcttttccctgccccgcggcaattaccggacaagaatgcggttgcagtagatgattttcctcagccccctgaaactgaaagccgtacagcgcacaggtacacgtcgttgccggatcgttaacgtcagaggccaccgcatgcagcctgccgcgttctatcaccactatatcatctgcatgcgcgacatataacgaagaatcgatggtaaaccttgccactcctttcttgacgtaaatcagctcggtttcattgtcatgaacgtgatgtccagactcccattttggatcatcgctaaatgcaaaacgtgaaagccgtggcgttttaccagcgacaaacagcgtttcactggcattatcaaaacagcgttgatacatgacaacctccctattccatgagcaagcaaaaacaatatatgccggataaaatacggcgtgtattgcggttatacaaccgcgtttagcgagagctaaacaagattatttacactgaatgcaagattgtacggtcatggaataactatattgccgcaaattgcacttttgttttagcgatcgcatttttttgcaagattgttggcaaggaaaacagcttgctccgtcgaaaaccccgcaccgctatcgcacactattttcaggccatttttaccttccatcggagatggttccgtatgcgactcacaggagaaatcatgaaaataataacctgctttaagctggtgcctgaagaacagggcattgttgtcactccagaatacaccctgaatttcgacaatgccgacgccaaaatcagccagttcgatctcaatgccattgaagctgcaagccagcttgcaacagatgacgatgagatagccgcgctgaccgttggcggctcattgttgcagaactcgaaagtgcgcaaagacgtgctatcccgcgggccgcacagcctgtatatggtgcaggatgcacaacttgagcatgcactgcctctcgataccgcaaaagcgctggcggcagcagttgaaaagatcggcttcgatttactgatctttggtgaaggttccggcgacctttatgcccagcaggttggcttgctggtcggagaaattctgcaacttccggtgattaatgcagtgagtgctattcagcgtcagggcaatacactggtgattgaacgcacgcttgaagatgacgttgaagttattgaactctctgttccagccgtgctctgcgtcacctccgatattaacgtgccacgcattccttcgatgaaagccattctcggcgcgggtaaaaaaccggtaaatcagtggcaggcaagtgatattggctggagccagagcgcaccacttgctgaactgaccggcattcgcgtaccgccgcaaacagaacgtaagcacatcattctcgataacgattcgccggaggccattgccgagctggcggaacatctgaagaaagccctgaactgaagcctacggagaagaaacgatgagtcaattaaacagcgtctgggtctttagcgataatcctgaacgttatgctgaactgtttggcggcgctcagcaatggggccaacaggtgtatgccattgtacaaaataccgaccaggcgcaggcagttatgccttatggtccaaaatgtatttatgttcttgagcaaaacgacgcgctgcaacgcactgaaaattacgccgaaagcattgctgctctgctgaaagataaacaccccgctatgttgctactggccgcgacgaaacgtggtaaagctctggcagcacggttaagtgtgcaactgaatgcggcgctggtgaacgatgccgcggcggtggatattgtcgatggtcacatttgcgccgaacaccggatgtatggcgggttagcgttcgctcaggaaaagatcaacagctcgctggcgatcattacccttgcacccggtgttcaggaaccgtgcgccagtgataactctcatcagtgcccgacagagacggtaccttatgttgctccgcgtcatgaaattctctgtcgcgagcgccgtgcgaaagcggcaagcagcgtggacctgagcaaagcaaaacgtgtggttggcgtcggtcgtggtctggcagcgcaggatgacctgaaaatggtccacgaactggcggcggtgctgaatgctgaagtcggctgttcacgtccaattgccgaaggcgagaactggatggagcgtgaacgttatatcggtgtctccggcgtgttgctgaaatccgatctctacctgacgctggggatctccgggcagatccaacatatggttggcggcaacggcgcaaaagtgattgtcgccatcaataaagataaaaatgcgccaatcttcaactatgccgactacggtctggtgggcgatatctacaaagtcgtccctgccctgattagccagttgagccgctaattcccctttcaaccacatctcccgctgtaaacgcagcgggaagggagcataacgcatgtcggatgacaaatttgatgccattgtggtcggtgcgggcgttgctggtagcgttgccgcactggtcatggcgcgagccgggctggatgtcctggtgatagaacgcggcgacagtgccggatgtaaaaacatgaccggcgggcgtctttatgcccacacacttgaagcaatcattccaggctttgcagtatcagcgccggtagaacgcaaggtcacacgcgagaaaatctccttcttaaccgaagaaagcgccgttaccctcgattttcaccgcgagcaaccagatgttccgcaacacgcatcttataccgtattgcgtaatcgtctggacccgtggttgatggaacaagccgagcaggcgggcgcacagtttatcccgggcgttcgcgtcgatgcgctggttcgtgaaggaaacaaggtcactggcgtgcaggctggggatgatattctcgaagcgaatgtggtgattctggctgatggcgttaactcgatgcttggccgctcgctgggaatggttcccgcttccgatccgcatcattacgctgttggtgttaaagaggttattggcctcacaccagaacagatcaacgatcgctttaatgttacgggcgaggaaggtgccgcctggctgtttgccggttcctcttcggacggcctgatgggtggcggattcctctataccaacaatgattccgtatcgttggggctggtttgtggattgggtgatatcgcccatgcgcaaaaaagtgtgccgcaaatgctggaagattttaaacaacaccccgccattcgcccgctgattagcggcggcaaactgcttgaatactccgcgcatatggtaccggaaggcggtctggcgatggtgccgcagctggttaacgatggcgtgattatcgttggtgacgccgcaggcttctgcctgaatttgggttttacagttcgcggcatggatttagccattgcatcggctcaggctgccgccacaacggtgattgccgccaaagaacgcacggatttctccgccagcagtctggcgcaatacaagcgtgagctggaacaaagttgtgttatgcgcgatatgcagcatttccgcaagatcccggcgctgatggaaaacccgcgcctgtttagccaatacccacgaatggtagccgacatcatgaacgagatgttcactatcgacggtaagcctaaccaaccggtacgcaaaatgatcatgggacatgcgaagaaaattgggctgatcaacttgctgaaagatggcattaagggagcaaccgcgctatgagccagaacgctacggttaacgtcgacatcaaattaggcgtcaataaattccatgttgatgagggccacccgcatatcattatggcggcaaatcccgatatcaatgaattccgtaaattaatgaaagcctgccctgccggactttataagcaggatgacgcaggaaacattcattttgattctgccggttgtctggaatgcggcacctgtcgggtgctgtgcggcaacactattctcgaacagtggcaatatcccgcaggcaccttcggtattgattttcgctacggctaatcatgcatcccacaggcccgcatctcgggcctgatgttctgtctcgagagtccaaaatgaaagtgacattaacgtttaacgaacaacgtcgtgcggcgtatcgtcagcaagggttatggggcgatgcttcgctggctgattactggcagcagaccgctcgtgcgatgccagacaaaattgccgtggtcgataatcatggtgcatcgtacacctatagcgcgctcgatcacgccgcgagctgtctggcaaactggatgttagcgaagggtattgaatcaggcgatcgcatcgcatttcaactgccaggctggtgtgaatttaccgttatctatcttgcctgcctgaaaaccggtgcggtttccgtgccgctgttgccttcctggcgggaagcagaactggtgtgggtgctcaataagtgtcaggcaaaaatgttctttgcaccgacgttgtttaaacaaacgcgtccggtagatttaatcctgccgctgcaaaatcagcttccacaactacaacaaattgtaggcgtggacaaactggctcccgccacctcttccctctcattaagtcagattatcgccgacaatatcccactgaccacggcgataacgacccacggcgatgaattagctgcggtgctgtttacctccggaaccgagggtctgccaaagggcgtgatgctaacgcataacaatattctcgccagtgagcgggcttattgcgcgcggctgaatctgacctggcaggatgtctttatgatgcctgcgccacttggtcacgcaacgggatttctgcatggcgtaacagcaccatttttaattggtgctcgcagcgtgttgttagatattttcactcctgatgcatgtctcgcgctgcttgagcagcagcgttgcacctgtatgctaggcgcaacgccgtttgtctatgatcttttgaatgtactagagaaacaacccgcggacctttcagcgctgcgtttctttctttgcggcggaaccacaatccccaaaaaagtggcgcgtgaatgccagcagctcggcattaaattattaagtgtttatggttccacagaaagttcgccgcatgcggtggtgaatctcgatgatcctttgtcgcgctttatgcacaccgatggttacgctgccgcaggtgtagagattaaagtggtcgatgacgcacgcaagaccttaccgccaggttgtgaaggtgaagaagcctcgcgtggccccaatgtgtttatggggtattttgatgaacctgaattaaccgcccgtgccctggatgaagaaggctggtattacagcggcgatctctgccgtatggatgaggctggctatataaaaattaccggacgcaaaaaagatattattgtccgcggcggcgaaaatattagcagccgtgaagtggaagatattttattgcagcatcctaaaattcacgatgcctgtgtggttgcaatgtccgatgaacgtttaggtgaacgatcatgcgcttatgtcgtgctgaaagcgccgcatcattcattatcgctggaagaggtagtggctttttttagccgtaaacgggtcgcaaaatataaatatcctgaacatatcgtggtaatcgaaaaactaccgcgaactacctcaggtaaaatacaaaagtttttgttaagaaaagatattatgcggcgtttaacgcaggatgtctgtgaagagattgaataagtttcatcttcggggatcacataaccccggcgactaaacgccgccggggatttattttatttcttcagttcagccaggcttaaccaggtttgcaccacggtgtccgggttcagagacaggctatcgatcccctcttccatcaaccatgcggcaaagtcttcgtggtcggacggaccctgaccgcaaatcccgacatatttgccctgtttcttcgcggcacggatagccatcgacagcagtgctttcaccgcatcgttgcgctcatcgaacaattcagacaccacgccggagtcacggtccagaccgagcgccagctgcgtcatatcgtttgagccaattgagaagccgtcgaaatattcgaggaactgctcggccagcaaggcgttggacgggatttcacacatcatgatgattttcagcccgttctcgccacgtttcagcccctgacgcgccagttcttcaaccaccgctttcgcctgatctacggtacgcacgaacgggatcatgatctcaacgttggtcagtcccatgtcgttgcgcacacgtttcactgcttcacactccagcgcgaaacagtcgcggaagctgtcggaaacatagcggcccgcgccacggaagccgagcatcgggttctcttcatctggctcgtaacgctcaccaccgaccaggttggcatattcgttcgatttaaaatcagagagacggacaatgacgcgcttcggataaaacgcggcacccagcgtcgcgatcccttcagtcagacgaccaacgtaaaattcacgcggagaatcaaaacctttcatcatctcgcggatttcgttttgcaactgcggttcctgatcgtcaaactcaagcagtgcgcgtgggtggacgccaatcatacggttgatgataaattccagacgcgcaaggcccacgccttcgttcggtaggcaggcgaagtcgaaagcacggtccgggttaccgacgttcatcatcactttcaacggcagatccggcatcgtttctacgctggagcttttcacgctaaattccagcaactccgcatagacgtaaccggtatcaccttcggcacaagaaacagtgacgttctcaccgtctttcatccgttctgttgcatctccacagcccactaccgccggaatgcccagttcacgagcgatgatcgccgcgtgacaggtacgaccgccacggttggtgacgatggcagatgctttcttcatgatcggttcccagtccgggtcggtcatgtcagtaaccagcacgtcgccaggttcgatgcggttcatttcgctgatgtcatggatgactttcaccggacccgcaccgatgcgatgaccgatagcacggccttcggcgataatcttaccctgtgaatgcagcgtataacgctccatgacctgaccgcgtgagcgcacggtttccggacgcgcctgcacaatgaacagtttaccggtgtggccatctttcgcccactcaatatccatcgggcgaccgtagtgtttctcaatttgtacggcctgttttgccagttcctgcacttcttcgttggtcagcgagaagatgtcacgctgttcctgcggtacgtcttcgattttaacctgcttgccgtgctcctgggtcggcgcgtaaaccatgcggatttttttcgaccccatggtgcggcgcacgatagccgggcgattcgccgccagtgtcggtttatgcacgtaaaactcatccgggttaaccgcaccctgcacgaccatctcaccaaggccccatgcggaagtgataaacaccacctggtcaaagccggattcggtatcaatggagaacatcacgccagatgatgcgaggtcagagcgcaccatccgttgaacaccggcggagagcgccacaccacggtgatcgtaaccctggtgcacacgataagagatggcgcgatcgttaaacagagaagcaaatacatgtttcactgccacgagaacggcgtcaaaaccctgaacgttgaggaaggtttcctgctgaccggcaaaagaagcgtccggcatatcttctgcggtggcggaggagcgcaccgcaaaagaggcgttttcgtcatcggcggaaagctgtgcataggcttcgcggatggcgttttccagctcaggctggaagggagtgtcgataatccactggcggatttgcgcgcccgctttcgcaagctgagtaacatcgtcaatatccgttttatccagcagttcataaatgcgctggtttacgccgctttggtccagaaactggttaaacgcgtcggcggttgtggcgaaaccattcggaacggaaacacccattccggaaagattagtaatcatttcacccagggaggcatttttgcccccaaccctgtctacatcattcatgccgagttggttataccaaagcaccagcggtgacgagccattgttggacatcgaacaatccttttgtgataaatgaacggtttgagaaacacatttctgcgcatttatctttgcatatttaaccggatgaaaaaaacggtgaatcgttcaagcaaatatatttttttactttttaagactgatcccagcgttgcgcaaatctgctctcttcgacaatttccacataaaccatcggtataaacgaaaccataaaaatgaaatgctgttttcataaaaaataaaattgaaggttcattttataaaccagacataacgttctacgcttctgtgcgtttttaatttatgctttcatagaattatgtctgcatcacgggaagaacaaaatggataatgctgttgatcgccacgttttttatatttctgatggtacggcaataactgcggaggtattaggacacgcagtaatgtcacaatttcccgtcactatcagcagcatcacgctgccgtttgtcgaaaatgagagccgtgcacgggcagtgaaggatcagattgacgcaatttatcaccagacaggcgtgcgcccgctggtcttctactccatcgtgttgccggagattcgcgccatcatcttgcaaagtgaaggcttttgccaggatatcgttcaggcgctggttgccccgctacaacaagagatgaaactggatccaacgccgattgctcatcgtacccatggccttaaccctaataatctcaataaatatgatgcgcgcattgcggcgattgattacaccctcgcccacgatgacggcatttcgttgcgcaatctggaccaggctcaggtgatcctgctcggtgtttctcgctgtggtaaaacccccaccagtctgtatctggcaatgcagtttggtatccgcgcggcaaactacccctttattgccgacgatatggataatctggtgctacccgcgtcgctcaaaccgcttcagcataaattgttcggcctgactatcgacccggaacgtctggcggcgattcgcgaggaacgtcgggagaacagtcgctatgcctcgcttcgtcagtgcaggatggaagtcgcggaagtggaagccttgtaccgtaaaaatcagatcccgtggattaacagtaccaattattcggtagaagagattgccaccaagatcctcgatatcatgggccttagtcgccgaatgtactagagaactagtgcattagcttatttttttgttatcatgctaaccacccggcgaggtgtgacacacctcgcacttgaaatcagcagcgattggtttatcgtgatgcgcatcacttcccggcagtcctgccgtagaagcaacaaatttctgagacttgtaatgaacagaactgacgaactccgtactgcgcgtattgagagcctggtaacgcccgccgaactcgcgctacggtatcccgtaacgcctggcgtcgccacccatgtcaccgactcccgccgcagaattgaaaaaatactgaatggtgaagataagcgactgttggtcattattggcccctgctcgatccacgatctcaccgctgcaatggagtacgccacccgtctgcagtcgctgcgcaaccagtaccagtcacggctggaaatcgtaatgcgcacctattttgaaaaaccacgaactgttgtcggctggaaaggactaatctccgatccagatttaaacggcagctatcgggtaaatcacggtctggagctggcgcgcaaattacttttacaggtaaatgagctgggcgtcccaaccgcgaccgagttcctcgatatggtgaccggtcagtttattgctgatttaatcagttggggcgcgattggcgcacgtactaccgaaagtcagatccaccgcgaaatggcttcggcactctcctgtccggtaggttttaaaaatggtaccgatggcaatacgcggattgctgtggatgctatccgcgcagcccgcgccagccatatgttcctctcgccagacaaaaatggtcagatgaccatctatcagaccagcggcaacccgtatggccacattattatgcgtggcggcaaaaaaccgaattatcatgccgatgatatcgccgcagcctgcgatacgctgcacgagtttgatttacctgaacatctggtggtggatttcagccacggtaactgccagaagcagcaccgtcgccagttagaagtttgtgaggatatttgtcagcaaatccgcaatggctctacggcgattgctggaattatggcggaaagtttcctgcgcgaaggaacgcaaaaaatcgtcggcagtcagccgctcacttacggtcaatccattaccgacccgtgtctgggctgggaggataccgaacgcctggtcgaaaaactcgcctctgcggtagatacccgcttctgaatgcgtgcccattcctgacggaatgggcatttctgcgcaacttgttgtcttctcaacaaattactgcttgctctggtcagccataatattgataataagaatcattgttatatcaattattattaatttttatgcgttatacggatagcagaaaactcacgcctgaaacggatgccaatcacaagaccgcttccccgcagcctattcggcgaatttccagccagacactgttaggtccggatggcaaactgattatcgatcatgacgggcaagaatatctgctccgtaaaactcaggctggcaagctgctgttgaccaagtagcctttaactcgagcagctgacttccagccgtttaccccagtcaggtggacgactgacatagtcatcatctctgtcgctgaaaggatttcgcaacgcctcatgcaggcggtgcaattccgtcatatcacccttttctgccgcttcaatcgcccgttgcgccaaccagttgcgcaataccagagcggggttaacgctttgcatcagttgctgacgctcactatcgctaacctcgtcttgttgcaaacgcccccgataacgggcaaaccagtcatcaaatgccgcacgatcaataaactcatcacgtagcggtgacgccgcgctgtgctgctcggtcagactcagcatgcggaatgtgcgggtataatcgctgcgctctcgcgccatcagactgaataattcattcagtagcgcgttatcctctttttgctccgtcatgaagcccagtttctgccgcatccgttctccataatgcgtcaacaaaacctgctgatagctgtccagggcctcattcagggcatctacggcaacaaatggcgacaatgtctgcgccagacgctgtaaattccacaacgcgacggcaggttgattatcaaagctgtaacgcccttgatgatccgagtgattacaaataaaaccgggttcgtaatcatcaagaaaaccaaacggcccgtaatcaagcgtcagccccagcagcgacatgttgtcggtattcatcaccccatgagcaaagccgaccgtctgccattgggcaattaacgacgcggtacgtgcgacaacatcgctaaaccagagacggtatttgtcctcatcatctgcaagatgtgaccagtaatgacgaatagcaaagtcagctaactgacgaaccttttccgactcgcggcggtagtaaaaatgttcgaaatgaccaaagcgcagatgacttggtgccacacgcatcagcatcgcgcctggctccgccgtttcccgatacactggcgaatcgctggtgacgatacttaacgcgcgggtcgtcggaatgcccagataatgcatcgcctcactggcgagactttctcgtatcgtcgaacgtaaaaccgcccgtccatcacccattcgcgaataaggcgtcaggccagcacctttcagatgccagtccattgtagtgccatcagcaagccgttgttcgccgagtaaaatgccgcgcccatcacccagttggcccgcccagacgccgaactgatgaccactgtaaacctgcgccagtggtgacataccaggcagtagggtttcgccaccccagacacctgcgccatttttaaacagtgacgatggaatacccagcgtgttagccagttcggcattatgccaaatcagccgggcattatttaaaggcgtaggggaaagtgttgtataggttgctggcaattcatcgcgccaacgggtaataaaagacagggtcatagatcctcctgtttgatagtgtagacggttactctcgtcttaaacaccagcaaacaggagggttatcgctgaaccaacgtcgttatctgatttacaggaacggcaggccacaggcatccctggagagcatggaaatcgaagggggtaatctgtgccaatatttctgccgtatcaatgcctcccgcaatgatgcaattgcaacaaggggaaatttgcgcctggatcgcacgaataaacggttcgaaggagcggtgcgtgatttgttgctgaataaaacttttatccagcatgacgcgggtgaaaagaccatcaaaaaccgctttcattgtgctattgcctgctcccaaattacctaacacaaggggatacacttgcgataaggataaaagaccgcgattatcttttccttcattgagatgcgggtaattctcattaatcaacagttcaataaacggatattttaatagttcgcctgcgtaattatccctctctaataataatgtagccacttgtggcgttaaattaagccaggcaaagagtttatgttgaataaaaaaatgttggcatgattttagtaattccaactgctctgaaaataattgccaatgttgctcctcggtaagttgcgctataacccgactcgtcgggatacgcaccgtgccatcttcactggagaaatgggtaattaactcaacgccgacaaggacttgctggttgtctcttatcggcaggaaatagcaatcagaatgataaagattctccaaaaaaatcttcatggtaaccgtccctctcgaaggatgtttttcagtatccggctaaaagggatgaggccataagacataacaattacagaaggagtaactttcatttgttccatgttaaccactttttcaggggtcctttttttagattatcctgattataaacgaataatccatttacggaatttttgtctgcaaaatactactgtattcaggagtaaatggacggcgatgtatcatcgccgtccatttttcgacatactagattcgtctcgcctgccagaaatttttctgccaatagacattatcaagtgaggaacgcatcactcccttgctggtagaggcgtggataaattggttgttggtatcgtaaatacctacatgcaaaccattttgtccggaccccgttttgaaaaagaccaggtcacctggcagcaactcgtctttatcaatttgcgtgccaatagaggcttgttgtttggtttcacggggcagctgcaaatcgaaacgatcgcgcatcgtcacaaccacaaatcccgaacagtccacaccgcgccgcgtcatgccaccataacgatacggcgtgccatgccagctttgtagctggtcgttcaaaccggcaataacggtaatcgaatcagaaagtctggcatttggcggcggtgctttatggtggctacacccggccagaagcagtgctgtgatcaaaataaggcagaaacgcattccgtacggttcctctgttttttattcttgcattaatttagcgtcgtaattacccgattttcaagatactaatgaaatcagatggtcgaaatcagcattctgtgaccttcgatatccagacggcgaaaattcatcccataggcctgcgccagatttggcggcgtgagcacctcttccctgcgtccactggccagcatttttccaccttttagcaaccacgcccgatgcgcatgacgcaatgtgtggttgagatcgtgactgctcatcacaatcgccagtccttgctgacacagcgcgctcagaattttgtctaacgcactttgttgcgcaacatcaagactgttcatcggctcatcaagaagcagcaattggcctgcgggattggcttgtggtgtgatttgcaacaccaccgcagcaagacgtacgcgttgccattcaccgccggaaagttgattggtgctacgtccgagtttgtcatcaagagccagcgcccctgcgacatcattcagtagttcggtacgcgttttatcgtgctgatgcagtgtcaggtagtgccagaccggcattgcaaacggcggcgtctgctgttgtgaaagataggcgcgatgcagcgcgagttttgttgcggaccatgcttccagtggttgccccgcgaactgaatgcttcccttaccgctggtcattccggccattcgcgccagtaaggtactcttacccgcgccattcggccccaccaggtgcaggatctccccagcccgaacctcgccagaaagcggccccaggcgggtagattccgcaacatcttgtaactgcatcacaatagacattattttgccaacgccagtttaatgctttccatcacaatgggatcttccggcgtcatatccggggaaaaacgctggatgacttttccgtccctgccaaccaggaatttttcaaaattccataaaatatcatccgggtacagcggtgcacggcctttgctgaccatacgggcatagaatccgctctcttccggcgcgactgcggtcggcgctgcggcaatcaatttttgatacagcggatggcgtccttcgccattaacttcaatcttactgaacatcgggaacgtcaccccccatgtggtggtacagtaagttttaatctcttcatcgctgcccggttcttgttccagaaactggttgcacgggaatcccagcaccataaaacctcgatcgacccaggctttctgaatattctccaactgctcatattgcggcgttaagccacactttgaggcgacattgacaatcaacagcacattaccggcgaacttctccagcgtggtcacttcaccgtcgatatctttcactacggtcgtcagaatggaatcttgcatcgtttctcctgggtgtggtcagtaaaaatcttagcttttaatcatagaccgtctttttgcggctaacgtcttgcttttaacaataaccagataaacaccggcgcacccaacgttgcggtgaccacgccaataggcagctctgcggcagctaatgccaggcgcgctacaatatcggccagcagcaatgcgctcgcccctgccagcgcgcagccgggaagtaatacgcgatgatcggttaaaccacacaaccgaagaatatgtgggatcaccagaccaataaagccgatagcacccgccagcgccacactgacgccaaccatccagccggtcgcggccaccagcacattgcgccagaaccacaggggtaaacccagttgccgcgccgagatctcgccaagtgctaacatattcatcggcctggactgacaacagatccacaacaacacggggatcaatgccagcatcagccagctttgccgccagtctacgccgccaaaaccgcccatcatccagtacatcagctgacgtaaatcaacagaggtggaaaagtagatagcccacgtcattagtgcgctacagataatccctaatgcaacgccagccagcaataaccgactggtcgaaagatgacgacgggcgaaacgtaagagtattaaagtgatgataagcgcgccagcaatcgcacacagccctagcgcccagttggggagttgcccttgcccaagcaataccgcggcgataagccccacgcctgcgccgttagagacgccaagtagtccaggttctgccagaggattttcaaacaacgcctgcattacagcgccggatatagccagcgccgcaccaaccagcaatacagccagcgtacgtggcaggcgaatttgccagacgaacagttcgccacgaggagtaaaccagtcacctggcgagatccattgttcaccggcgcaaaggcttaagagaagcgccagcagcatcaaaactgacaggcataataaccagcgaatattttgtcgctgttgttggcggtcaagtgtcagcatggtatccgttctgctgaagtgtcatggcgttgattttacggtgactcttcgacagtgaaaagaaaaaaggccgcagagcggcctttttagttagatcagattactcgtctttgggcgaagcgttttcgacccggctttttaacttctgcccgggtctgaaggtcaccacgcgccgtgctgtaatgggaatatcctcgcccgttttcgggttacgtcccgggcgttgattcttatcacgcagatcgaagttaccaaaaccagagagtttcacctgttcgccgttttccagagcgcgacggatctcttcgaaaaacagttcaaccagttctttggcatcccgcttgctaagcccaagcttatcaaacagatattctgacatttcagcttttgtaagcgccataggttcaatccctcaatgatgcctggaatcgctcttttaatgcctctacacatttggcgacggtagcggcaatctcctcttcttcgagtgtacggctggtatcttgcaggatcaggcttatggcgaggctcttatacccctccgcaacacccttaccgcggtacacgtcaaataagtttacgccaactacctgatttacgccaactttcttacattcggataaaatatccgctgcgggaacgttttctgcgaccaccaccgcgatgtcacgacggttcgccgggaagcgagaaatctcgcgcgcctgaggcaccacgcggtctgcgagcttgttccactccagttcgaacaccagagtgcgaccgttaagatccagtttacgttccagttcaggatgaacaaccccaacaaaaccaatacgttcacctttcagataaatcgctgcggattgccccggatgcagtgccggattcgcttctgcacggaactcaacctcattcagtttaccggtcaggtcgagaacggattcaagatcgcctttcaaatcatagaaatcaacggtctcttttgccaggttccagtgctcttcgtaacggttaccgcaaatcacaccggctaacatcagatcctgacgaatgcccaacggtgcctgagtatctggtacgaaacgcagaccgctttcgaaaatgcgcacacggttctgctgacggttctggttgtacaccacggttgccagcaggccagtccacagagaaagacgcattgctgacatttcaacagagatcgggcttggcagcagtaaggcttcaacgcctggatggatcatctgctgcactttcggatcaacgaagctgtaggtgatcacttcctgatagcctttgtcgttgagcagcgttttcacgcgcttgagcgacaggtcagcttcacggtgagtacccataatcaggcttgcctgtaccggctcatccgggatgttgttgtagccgtaaacacgcgcgacttcttcaaccagatcttcttcaatctccatatcgaaacgccagctcggcgcaactgcctgccattcgtctttgccttcggtcacttcgcagccgagacgacgcagaatgtcagttacctgctcatccgcaatatgatggccgatcaggcgatccagtttgctacgacgtagagtgatggttgcacgcttcggcagcgttgcttcgttggtgatatcaattaccgggccagcctcaccaccgcagatgtcgatcagcagacgggtcgcacgttccatcgctttgtgctgcagtgccggatcaacgccacgctcataacggtgagacgcatcggtatgcaggccatgacgacgagcacgaccggtgatagacagcgggctaaagaacgcgcattccagcagcacgttttgtgtttcgtcattcacgccagagtgttcgccaccgaagatgccgcccatcgccagcgccttgttgtggtcggcgatgaccagagtgtcagcattcagcttcgcttcagtaccgtcgagcagcaccagcgtttcgccctctttcgccatccgcaccacaatgccgccttcaatgcgatctttatcgaaagcgtgcatcggctggcccagttcgagcagcacatagttggtgacgtcaacaactgcatcgatagaacggatcccgcaacgacgcagtttttctttcatccacagcggagttggcgctttaacgttaatgccttttaccacacggccaagataacgcgggcaggcttccggcgcttcgactgtaatcggcagcgtgtcgtcgatggtcgcaccaaccggaacgatttccggttgaaccagcggcagctggttcagcacggcaacgtcacgcgcaacaccaatgatgcctaagcagtcggcacggtttggcgtcacgctgatttcgatggtgttgtcatcaagtttcaggtattcacggatatcggtgccaatcggcgcatccgcaggcagttcgataatgccgctgtgatcgtcagaaatgcccagttcagagaaggagcacagcatcccttcagacggttcgccacgcagtttcgccgctttaattttgaaatcacccggcagaacagcaccaatggtcgctaccgccacacgcaggccctgacggcagtttggcgcaccgcagacgatgtccagcaggcgatcgccgccgacattcacttttgtcacacgcagtttgtcagcgttcggatgctgcgcacactcaaccacttcaccaacgaccacgccgtggaagctgccggcaaccggttctacaccgtcaacttccaggcccgccatagtgatttgatttgccagcgcatcgctatcaatcgccgggttcacccattcgcgtaaccacagttcactgaatttcataatctattcctgccttatttaaactgtttgaggaaacgcagatcgttttcgaagaatgaacgcaggtcggtgacgccgtaacgcaacatagtcagacgctccatccccatcccgaaggcgaaaccagagtaaacttccgggtcgatgccaacgttacgcaacacgttcggatgcaccatcccgcagcccagcacttccagccatttaccgtttttacccatgacgtccacttctgcagaaggttcggtaaacgggaagtaggaaggacggaagcgaatctgcaaatcttcctcaaagaagttacgcaggaagtcgtgcagcgtgcctttcaggttggtaaagctgatgttggtatcaacaatcagaccttccatctgatggaacatcggcgtgtgagtctggtcgtagtcgttacgataaacacggccaggcgcgatgatacgaatcggtggctgctgggctttcatggtgcggatctgtacgccagaggtctgggtacgcagcaggcgggtagtgtcaaaccagaaagtgtcgtggtcagcgcgcgccgggtggtgaccaggaatgttcagagcatcgaagttatgataatcgtcttcgatttccggcccggttgccacggtaaagccaagctcaccgaagaaactttcgatacggtcgatggtacgggtaaccggatgcagaccgccgttttcaatgcgacgacctggcagagagacatcaatcgtttccgccgccagacgcgcattcagtgcagcgctttccagttccgctttacgcgcattcagcgcctgctgaacctgctctttcgcttcgttgataaccgcaccagctgccggacgctcttctggcggcagctcacgcagggtcgtcatctgaagggttaagtgcccttttttacccaaatattcgacgcgcacattatctaacgcggcaacatctgacgcctggctaatggccgccttcgcactggcaaccagttctgcgagatgtgacatggttttcctcattgtgtcagtggtgacactggttcgttggacttagagcctatcccatcaggctattttacttgccattttggtcccgggctgtgctcgaaattctcacgtacttaaatacgctccggtttctccgcgctggccgtgtccagtctggctgcgacaattacacctgatgagacaggctttttatttttcaaaacgcgcatacaaaaaaagcctccactgggaggctttcaggcgctgttttccgtttctcttctcacgcgctagcctcctggattcaggtgctaaagtaaaaaaagaagcggaaaatagcagcattcattgcttgcgttaccttttggtactcttcaaaagacctttattgaaaaggctacggcgataaaagtcaatgttttgatggcgttgaaacgaaaagagggagactagctccctctttcaactggcttatgccagagctgctttcgctttttcaaccagagcggtgaacgctactttgtcgaatactgcgatatcagccaggatcttacggtcgatttcaacagaggcttttttcaggccattgatgaatttgctgtaagaaataccgttctgacgtgctgctgcgttgatacgcgcaatccacagttgacggaactgacgcttacgttgacgacggtcacggtaagcatactgaccagctttgataacagcctggaaggcaacgcggtatacgcgagaacgcgcaccgtagtagcctttagcttgtttcaaaattttcttgtgacgtgcgcgtgcaataacaccacgttttacgcgagccatatgtgctctcctgtatctatattctaattaaaaagttaaaaacgttaacggcttatgcgtacggcaggcacgcgattaccaggcccagatcgcctttggaaaccatggctttcggacgcaggtgacgtttacgtttggtcgcttttttggtcagaatgtgacgcaggttagcgtgcttgtgcttaaaaccacctttaccggtttttttgaagcgcttagcagcaccgcgtacggtcttaatttttggcattttaataacttccacttcgcattgttaataaacgaaacaaaggcgaacaaagcctgtgaagcccgaaggctccacagacagtgctacttgaaggccttactgtttcttcttaggagcgagcaccatgatcatctggcggccttcgatcttcgttgggaaggattcgaccactgccagttcttgcaaatcgtctttcacgcgattaagcacttccataccgatttgctggtgcgccatctcacgaccgcggaaacgcagcgtgattttggctttatcaccctcttcgagaaagcgaatcaggctgcggagttttacctgatagtcgccttcatctgtaccaggacggaatttaatttccttaacctggataactttttgctttttcttctgttccttagaagacttgctcttttcatagaggaatttgccgtaatccattatacgacaaaccggcggctcggcgttagggctgatctcgactaagtctactccggcttcttctgctttctccagagcttctctcagactcacaataccaagctgctcgccttccagacctgttaagcgaacttcctgggcgcgaatttcgccattgatacggttagggcgcgccgtttgaactcgttttccgcctttaataccttattcctccaattgtttaagactgcggctgcgaatctcttgttgcagcttctcgatcacttcatttacgtccatgcttcccaggtctttaccacggcgggtgcgaacggcaactttgccagattccacctctttatcaccacagaccagcatatatgggacgcgacgcaaagtgtgctcgcggattttaaagccaatcttctcatttctcaagtctgctttaacacgaatgcccgcatttgatagtttttgcgtcaattcgttaacgtaatcagactgtgaatcggtaatattcatgataacaacctgaaccggcgcaagccaggtcgggaagaaaccagcgaattcttcggtcaggataccgatgaaacgttccatcgacccaagaattgcgcggtgaatcattaccggtaccttacgctcgttgtcttcgcccacataggaggcgctcagacgagacggcaaggagaagtccagctgtactgtaccgcactgccatgcacgatcgaggcagtcatacagggtaaattcaattttcggaccgtagaaagcgccttcacccagttgatattcaaacgggatgttgttttcttccagcgcaaccgccaggtccgcctcagcacgatcccacatttcgtcgctgccaatacgtttttcaggacgagtggagagtttgacgacgatcttctcgaagccaaaagtgctgtacatatcatagactaaacggatacatccgttaacttcatcgcgaatttgttcttcagtacagaagatatgcgcgtcatcctgggtaaaaccacgcacgcgcatcaggccatgcagcgaacctgacggctcgttacggtggcagctaccaaactcggccatacgcagcggcagatcgcgataagacttcagcccctggttgaaaatttgtacgtgacccgggcagttcatcggcttaatgcagtattcacggttctcagaagacgtggtgaacattgcatctttgtagttgtcccagtgaccggttttttcccacaggacacggtccatcatgaacggacctttaacttcctgatactggtactctttcagtttagaacgaacaaacacttccagttcacggaaaatggtccagccgtcgttgtgccagaataccatacccggcgcttcttcctgcatatgatacaggtcgagttgtttaccgattttacggtggtcgcgtttcgcggcttcttccaggcgctgcaggtaagcgttaagtgcttttttgtctgcccacgccgtaccgtaaatacgttgcaacattttgttgttgctgtcgccacgccagtaagcccctgccgttttcattagtttgaaatgatggcagaaacgcatgttcggtacgtgcggaccgcggcacatatcgacatattcttcatggaagtacagacctggcttgtcatcatgggcgatgttttcgtcaagaatggagactttgtagctctccccacggttggcgaaagtttcacgcgcttcgtgccagctgactttcttcttaatgacgtcgtagtttttctcagcaagctcatgcatccgcttctcgagtgcttcgacatcttcctgggttaacgtgcggtcaagatcaacgtcgtaataaaaaccgttgtcaataaccgggccgattgccattttggtatgcggccaaagttgtttaatcgcgtgccctaacaggtgcgcacaggagtgacgaatgatctccagaccttcttcgtctttcgcggtaatgatcgacagttgtgcgtcgttttcaatcagatcgcaagcatcaactagttcgccattaacgcgccctgcgatacaggctttcgccagacctggaccaatgtccagcgcaacatccatggggcttacagcgtgatcgtaatggcgttggctgccatcaggaagagttataacaggcattttatatccttatttgcagtggtgacccacacgaaagatcacatacaaagaaaaatttgtttattaacagttcattgcgaaaccatctagccaacaaatgctaaattggttcgcaatcaggtacacaaatgaaagacattaacctctcaccttccacccggttgagcgatgttaacactaaaaaaagggagattgtacctttccgtttcacattgattcgattcgcaattcgtttgtagtgagtacaccagcaaaacgcttaaagaacaactgataacatcacggagcgtctgaaaggtttactgcgagcggatttacagcagcataaactgaatccagcaaagttcgttgcatgatttggcggtagtatttaaacgatcatgagattaatgacgaactggtcatatcacaatgataaaagtgacacaattcttatagcaatttttcgtgcacatttcgttctggcgataataattaatcatcatcctcaaaatctccagacatatataaggcgaatagattatgagtcaaaacgatatcattatcagaactcattataagtctcctcatagattgcacatcgatagcgacataccaacgccttcatcagagcctattaatcaatttgcgcgccaactcatcaccctacttgatacctctgacttaagttcgatgctgtcatactgtgttactcaggaatttaccgcaaactgtcgaaaaatatcacaaaattgttattccactgccctttttatcattaactttgccacttcacccatccatgcagaaaatatactcattacattacactataaaaaagaaatcattcccttatttctggaaaccacgcctattaaggctaaccatttgcgaagcatactggattatattgaacaggaacagttaactgccgaagatcgtaaccattgtatgaaactgtctaaaaaaatccatagagaaaaaactatacaaccaacagtaaatctcaatggtagtgcatttttttcgcaatctccttctgacgctattttttgtcgccatctgtcattgcaatacgcccttgattcattgagaaatggaaaaggcaaagtcaacctgattaaacactactcctccgttgaatccatacagcagcatgtccccttagtccgggacgcggagttcagagcattacttcgccatcctcctgcagggagtcgcgttatcgcgagtaaggattttggcttcgctttagatattttcttttgtcgaatgatggcaaacaatgtcagtcatatgtccgcgattttatatatagacaatcatactttgtcagtaaggctacgaataaagcagtcagcgtatggacaattaaattatgttgtgtctgtttacgacccgaacgataccaacgttgccgtcagaggcacccacaggacagcacagggctttctctcgcttgataagttcatcagttcaggtcccgatgctcagacttgggctgataggtatgttcgcaactgtgcaattgctattctgcccctattacctgtgggagttccaggggctattttcgcgggtattgcatcacgaatgccatttgcccctatacatccatcggcaatgttgttaataatggccacaggccagactcaacagcttattacattattcaaacagttgcccatactccctgaaaaagaaatcattaaaataataactgcgcagaatagcgttggtacacctgctttatttctggctatgatgaacggacatactgacaacgtaaaaatatttatgcaagaaattcagtcactgatatacaatcatatcattcatgaagataatctggttaaattactgcaaactaaaagtgctaacgaaacacctgggctctatatctccatgttgtatgggttcgatgaaacaatcgatatctttctgaatgcattaaccactccaatagcacaagagcttttaaacaaaaaaatagtgatggatattttagcaatgaaaacacgtgatggtgaaccagggttgtttgctgcaatggaaaataatcaccctttgtgtgtcacacggttcctctctaaaattaatggcatcgcctttaaatacaagttgagcaaagctaacatcatgaatttattaaaaggcgctacagcacatggaacccctgcattatacatcgccatgagcaagggtaatgaagacgtcgtgttatcttatatatcgacgctgaatatttttgcaaaaaaatattcttttagtcaacgtcagttattcacactgttggccgctaaaaatcatgacaacatgtcagctgttcatatagccattcatcataatcattataaaactgtagaaacatattatgctgctataaatgtaatcagccaaagcctgagttttagtgctgatgaactaaagacgtatttataaccaactattttcgatatatatgttgatgcataatattattttttcataaaacgcagaaacagtgaccaggtgtacaacgccacccaacggctgtaataacaaaaaatcccttgatgcccgtcccttttgttacactccgttatcacgcacaagagatatgcaggacactggtatgccgactaaacgctttgataaaaaacactggaagatggtggtggtgctactggcaatctgtggcgctatgttgttgctacgttgggcagcaatgatttggggctgagcagtgacaaacgaagacagccagaccgcataacacggtccggcagataattttacatgctgtagcccagcgataaggttgtccgacggtcggtatgttccggtgcagactctggaggttcagagttccatgtaacgttgtaagccaccttcagtccaaaatgttcattaatagcaacatttaatgcgctttcggagttcagcgttgtgtcttccgcgccaaagaccgaaacaccctgcgtaaatttagcgttgtcagtcaactgccatgcataagccccggaggcatagcccagcggctgggtttcactggcattgtcagtatatttgtcgtaacgcacacctgggccgaattcaaagcggaaactgtgtaccggaccattcaaaaactggcgaccataacccgcggtcaacacatcgcgctctcgatagccgttataacggtctgtcagccaacttgcctgaccaaataaatagtcataatcagttaaattaaaacggctacgcccgcccgccgcatatttttctgaagaacgctcatcattagaagaagtattactggcgttcccccacagcgaccaggcagtggtttgtccataccaggtcatggtggtgtcagccgtaagtgaggagcttttcgtattgcctgattgtgcaagatatcctgcgttcagattaccttcgaaaggttttttagcgctggcaggatcgtccatgacagtaaaaacggaatcatcggcagctgcattcagtgacgcaaacatgccccccgccaacataacgatggcaggaactgtcttcaaaagcttcatttatcaagagtccgtacaacaaaaaaagagaccatcgcggtcccggaaactttcttaaggatcaaagattagcgtccctggaaaggtaacgaattataaaaaggcgcgaataacttagcaatgtattcttatttcattttttgaataagcatgtggcgaaaacagatttttatttatatatatttatctgcaaaattttaaataaagctccaataaatcatattgttaatttcttcactttccgctgattcggtgccagactgaaattagcctataggaggaaatgatggtacgtatctatacgttgacacttgcgccctctctcgatagcgcaacaattaccccgcaaatttatcccgaaggaaaactgcgctgtaccgcaccggtgttcgaacccgggggcggcggcatcaacgtcgcccgcgccattgcccatcttggaggcactgccacagcgatcttcccggcgggtggcgcgaccggcgaacatctggtttcactgttggcggatgaaaatgtccccgtcgctactgtagaagccaaagactggacccggcagaatttacatgtacatgtggaagcaagcggtgagcagtatcgttttgttatgccaggcgcggcattaaatgaagatgagtttcgccagcttgaagagcaagttctggaaattgaatccggggccatcctggtcataagcggaagcctgccgccaggtgtgaagctggaaaaattaacccaactgatttccgctgcgcaaaaacaagggatccgctgcatcgtcgacagttctggcgaagcgttaagtgcagcactggcaattggtaacatcgagttggttaagcctaaccaaaaagaactcagtgcgctggtgaatcgcgaactcacccagccggacgatgtccgcaaagccgcgcaggaaatcgttaatagcggcaaggccaaacgggttgtcgtttccctgggtccacaaggagcgctgggtgttgatagtgaaaactgtattcaggtggtgccaccaccggtgaaaagccagagtaccgttggcgctggtgacagcatggtcggcgcgatgacactgaaactggcagaaaatgcctctcttgaagagatggttcgttttggcgtagctgcggggagtgcagccacactcaatcagggaacacgtctgtgctcccatgacgatacgcaaaaaatttacgcttacctttcccgctaacaaaaacattcccccagcattgggggaatcaccaccaactgtcggcaacgcgtttctccgactatgctcaaaagtcatgtgataacaaaggggtgaactatggccagtggcgatcttgtccgttatgtcataaccgtcatgttgcatgaggatacattgactgaaattaacgagttgaataattacctgactcgcgacggttttttgctcaccatgacggatgataagggaaatatccatgagctggggactaacacttttggacttatcagtacccaaagtgaagaagaaattagagaactggtttcggggcttacccaaagtgcaaccggcaaagatcctgaaatcaccatcacgacctgggaggaatggaatagcaacagaaaataaatggtttttgggcaataatcagtctgtggtgtgcgttagctcgtgtttttacaccgcattcttgcgctaaccttatgatctggcagacaacatgggagagacatcatgtggcaggcaatcagtcgtcttttgagcgagcagttaggtgaaggcgaaatcgaactgcgtaatgaactgcctggcggagaagtccatgccgcatggcatttgcgctatgcaggacatgactttttcgtcaaatgtgatgaaagggaactgcttcccggttttaccgccgaagccgaccaactggagttactgtcgcgtagtaaaaccgtcaccgtgcctaaggtttgggcagttggcgccgaccgtgactacagttttctggtgatggattatctcccacctcgtccgctggatgcgcatagcgcatttattcttggtcagcaaattgcgcgtttacaccaatggagcgaccaaccacaatttggactcgatttcgataacgcgctctccacaactccacagcccaacacctggcaacgtcgctggtcaacgttttttgctgaacaacggattggctggcagttggaactggcagcagagaaagggatcgctttcggcaatatcgacgccatcgtcgagcatattcagcagcgtctggcctcgcatcaaccgcagccttctctgttgcacggcgatttatggtccggcaactgtgcgctgggtccggatggcccgtacattttcgacccggcctgctactggggtgaccgagagtgcgacctggcgatgttaccgctgcatactgaacagccgccacaaatctatgacggctatcagtcagtatccccgctacctgccgatttccttgaacgtcaaccggtttaccaactctacacgctgttaaatcgtgcaaggttatttggcggtcagcatttggttattgctcagcagtcattggatagattattagcagcatgatatgggttgaggataatggccgctccgtgcggccttttgattaaataaacccaagcagagaaaagaacacataacctgcagcaatacaaataaccggcaggatatacagtgagaaaaactgcaggaaaatagtatggtgcggaacaacaatacgggactcaatttgttcacgcgttagcccctcttcccctttggctttttccagaatgagttgatcttcaacaccttcccgcaagaagcgcgcctggcgactcatccgggcaccggaatcctgcaacgccagtccgacaaaaatcaggatgaaaatcacccagaacataacgttcacgccaccattaaaattgggcgtcggggagttataccagaatagattcaaaaaaggcgtattcgcctgcatcatatcgatcatgacatgagtaaagtcgagcatgaccgcattaatgccttcctggttttcctgccgggtattcataaatttcagcaaagaaatcaatgtagagatcaatgcaggtataaaaatcacccaacccaaaatccttttcaaaacagcaatgcgtccagcttgttgatacgtcatgagttctccttgattaagacgcgtcgtttcacttagtttacctgtagatatctgttttcgcccattctttaaaggcgatatgataggcgcttaatcataagcacggcttaataccttacacataatgctctaaaggagaggttgtaatgtcaaccccgcgtcagattcttgctgcaatttttgatatggatggattacttatcgactcagaacctttatgggatcgagccgaactggatgtgatggcaagcctgggggtggatatctcccgtcgtaacgagctgccggacaccttaggtttacgcatcgatatggtggtcgatctttggtacgcccggcaaccgtggaatgggccaagccgtcaagaagtagtagaacgggttattgcccgtgccatttcactggttgaagagacacgtccattattaccaggcgtgcgcgaagccgttgcgttatgcaaagaacaaggtttattggtgggactggcctccgcgtcaccactacatatgctggaaaaagtgttgaccatgtttgacttacgcgacagtttcgatgccctcgcctcggccgaaaaactgccttacagcaagccgcatccgcaagtatatctcgactgcgcagcaaaactgggcgttgacccactgacctgcgtagcgctggaggattcggtaaatggcatgatcgcctctaaagcagcccgcatgcgttccatcgtcgttcctgcgccagaagcgcaaaatgatccacgttttgtattagcaaacgtcaaactctcatcgctgacagaactcaccgcaaaagaccttctcggttaatgaccaggggcagtgatctcgctgcccctggttctttatctgaatttgcattcaactgacggattaatcgtcaatttaagagaaagagttacaccgtcaccacttccgtgcactgtataaaaatcctatactgtacgtatcgacagtttagtgagttttatcatgacggcggaaggtcaccttctcttttctattgcttgtgcggtatttgccaaaaatgccgagctgacgcccgtgctggcacagggtgactggtggcatattgtcccttccgcaatcctgacgtgtttgttaccggatatcgatcacccaaagtcgtttcttgggcagcgattaaagtggatatcaaaaccgatcgcccgcgcttttgggcatcgtggttttacccacagtctgctggcagtatttgcgctgctggcaaccttttaccttaaggttcctgaaagctggttcattccggctgatgcgctacaaggaatggtgctgggttatttaagccacatacttgccgatatgctgacacccgccggtgttccactgctctggccatgccgctggcgtttccgcttgcctatcctggttccccaaaagggcaaccaactggaacgttttatctgcatggcattatttgtctggtcggtatggatgccccattcattacccgagaacagtgctgttcgttggtcatcgcaaatgatcaataccttgcagatccagtttcatcggcttattaagcatcaggttgaatactaaaaaggcaaaaatcacctttctggaataagcaattccatttgaatataagagccagctcacagttctgttaatcttgcgccaacactatgactgctacgcagtgatagaaataataagatcaggagaacggggatgaactttccattaattgcgaacatcgtggtgttcgttgtactgctgtttgcgctggctcagacccgccataaacagtggagtctggcgaaaaaagtgctggtgggtctggtgatgggtgtggtttttggccttgccctgcataccatttatggttctgacagccaggtacttaaagattctgtacagtggtttaacatcgttggtaacggctatgttcaactgctgcaaatgatcgttatgccgttagtcttcgcctctattctgagcgcggttgcccgtctgcataacgcatctcagttaggcaaaatcagttttctgaccatcggtacgcttttgtttaccacgctgattgcggcgctggtcggtgtgctggtcaccaacctgtttggtttgacggctgaaggtctggttcagggtggtgcagaaactgcacgtctgaacgccatcgaaagtaactatgttggtaaagtctctgacctgagcgttccgcagctggtcttgtcctttatcccgaaaaacccgtttgccgatctgaccggagccaatccgacgtcaattatcagcgtggtaatttttgccgcattcctcggtgtagctgcgctgaaactgctgaaggatgatgcgccgaaaggtgaacgcgtcttaaccgctatcgataccctgcaaagctgggtgatgaaactggttcgcctggtcatgcagttgaccccttacggcgttctggcactaatgaccaaagtggttgcaggttcgaacctgcaagacatcatcaaactgggaagtttcgttgtcgcgtcctacctcggtctgctgattatgtttgcagtgcatggcattctgctgggcattaatggcgtgagtccgctgaagtacttccgtaaggtatggcctgtgctgacgtttgcctttaccagccgttccagtgctgcgtctatcccactgaatgtggaagcacaaacgcgtcgtctgggcgttcctgaatccatcgccagtttcgccgcctctttcggtgcgaccattggtcagaacggctgcgccggtttgtatccggcaatgctggcggtgatggttgcgcctacggttggcattaacccgctggacccgatgtggattgcgacgctggtcggtattgttaccgttatctccgcaggcgttgccggtgtcggtggtggtgcaactttcgccgcactgattgtgctgcctgcgatgggcctgccagtaaccctggtggcgctgttaatctccgttgaaccgcttatcgacatgggccgtacggcgctaaacgttagtggctcgatgacagctggcacgctgaccagccagtggctgaagcaaaccgataaagccattctggatagcgaagacgacgccgaactggcacaccgttaattcttatgctggcaacggtccgttttgtataggggccgttgccttactttttaaatgttccatcgcggcgatgcatactgactcatattgaaacagatcgtcagcgaaaaaaatggccaacttatcaatacattcctggctcaatgaatgtgcctgtagcgagaagcttaaaacctcatacccgagacgttttctaagtgaactatctggaatactcataatatcttcaagtataccacttcccattcccggaagatttagtggattaaaaagaagattgatattaagtattgatattatcgaaggaaactttaggagactctcatttttttgaatcgcagcaaaaatgctcccggcaggatgtatataatttttttcatagtatatagtccttaaataatgaataaccaacctgttttttatattgatcaaattcgtcattttttcgggtcggaattcacaggtaaaatccatcccaacaaaattctcattaatacctcttatccgaaactcactgccataaagattattaattatcactctatatttaacattgtcctgcagatacgtatcaaaactaagtgctggcgctcctggctttgaggcatcatagttaatgttagacatataggcaatcatataattaaagtttgattctgctatttcatcgcagtcacattgacccgttgatataaagaaagtgagtgctgtcatagtagactgcagcctttctttaaaagagtcaaaagccagacttttaatatttaaatcaccataattactctgtattaagtttgtagaaaacatctcccacctcatattgttaacaaaattattatctcatttaaatctaagtcatttacaatataagtttaagcgcgacgccacaggatgaactatcaaaaatagctcatcatgattagcaaaacttaaccattttaaaataaataaacaattaaagaaaaaagatcacttatttatagcaatagatcgtcaaaggcagctttttgttacaggtggtttgaatgaatgtagcaatgaaatacagaatttcaggccatgtaactcccggcaaaaccgggaggtacgtaatctttactcagtcacttccccttcctggcggatctgatttgcccaacgctgggcggattcaggcacagtaaacgccggtgagcgcagaaatgactctcccatcagtacaaacgcaacatatttgccacgcagcatccagacatcacaaaacgaatccatctttatcgcatgttctggcggcgcgggttccgtgcgtgggacatagctaataatctggcggttttgctggcggagcggtttcttcattactggcttcactaaacgcatattaaaaatcagaaaaactgtagtttagccgatttagcccctgtacgtcccgctttgcgtgtatttcataacaccgtttccagaatagtctccgaagcggggtctggctggtggtctatagttagagagttttttgaccaaaacagcggccctttcagtaataaattaaggagacgagttcaatgtcgcaacataacgaaaagaacccacatcagcaccagtcaccactacacgattccagcgaagcgaaaccggggatggactcactggcacctgaggacggatctcatcgtccagcggctgaaccaacaccgccaggtgcacaacctaccgccccagggagcctgaaagcccctgatacgcgtaacgaaaaacttaattctctggaagacgtacgcaaaggcagtgaaaattatgcgctgaccactaatcagggcgtgcgcatcgccgatgatcaaaactcactgcgtgccggtaaccgtggtccaacgctgctggaagattttattctgcgcgagaaaatcacccactttgaccatgagcgcatcccggaacgtattgttcatgcacgcggatcagcagctcacggttatttccagccatataaaagcttaagcgatatcaccaaagcggatttcctctcagatccgaacaaaatcaccccagtatttgttaggttctctaccgttcagggtggcgctggctctgccgataccgtgcgtgatatccgtggttttgccaccaagttctatactgaagagggtatttttgacctcgttggcaataacacgccaatcttctttatccaggatgcgcataaatttcccgattttgttcatgcggtaaaaccagaaccgcactgggcaattccacaagggcaaagcgcccacgatactttctgggattatgtttctctgcaacctgaaactctgcacaacgtgatgtgggcgatgtcggatcgcgggatcccgcgcagttaccgcaccatggaaggcttcggtattcacaccttccgcctgattaatgccgaagggaaggcaacgtttgtacgtttccactggaaaccactggcaggtaaagcctcactcgtttgggatgaagcacaaaaactcaccggacgtgacccggacttccaccgccgcgagttgtgggaagccattgaagcaggcgattttccggaatacgaactgggcttccagttgattcctgaagaagatgaattcaagttcgacttcgatcttctcgatccaaccaaacttatcccggaagaactggtgcccgttcagcgtgtcggcaaaatggtgctcaatcgcaacccggataacttctttgccgaaaacgaacaagcagcattccatccaggtcatattgttcctggtctggacttcaccaacgatccgctgttgcaggggcgtttattctcctataccgatacacaaatcagtcgtcttggcgggccaaatttccatgagattccgattaaccgtccgacctgcccttaccataatttccagcgtgacggcatgcatcgcatggggatcgacactaacccggctaattacgaaccgaactcgattaacgataactggccgcgcgaaacaccgccggggccgaaacgcggcggttttgaatcataccaggagcgcgtggaaggcaataaagttcgcgagcgcagcccatcgtttggcgaatattattcccatccgcgtctgttctggctaagtcagacgccatttgagcagcgccatattgtcgatggtttcagttttgagttaagcaaagtcgttcgtccgtatattcgtgagcgcgttgttgaccagctggcgcatattgatctcactctggcccaggcggtggcgaaaaatctcggtatcgaactgactgacgaccagctgaatatcaccccacctccggacgtcaacggtctgaaaaaggatccatccttaagtttgtacgccattcctgacggtgatgtgaaaggtcgcgtggtagcgattttacttaatgatgaagtgagatcggcagaccttctggccattctcaaggcgctgaaggccaaaggcgttcatgccaaactgctctactcccgaatgggtgaagtgactgcggatgacggtacggtgttgcctatagccgctacctttgccggtgcaccttcgctgacggtcgatgcggtcattgtcccttgcggcaatatcgcggatatcgctgacaacggcgatgccaactactacctgatggaagcctacaaacaccttaaaccgattgcgctggcgggtgacgcgcgcaagtttaaagcaacaatcaaggtcgctgaccagggtgaagaagggattgtggaagctgacagcgctgacggtagttttatggatgaactgctaacgctgatggcagcacaccgcgtgtggtcacgcattcctaagattgacaaaattcctgcctgatgagaggcggcgcaattgcgccgcctcaaatgatttacatagtgcgctttgtttatgccggatgcggcgtgaacgccttatccggcctacaaaactgtgcaaattcaatatattgcaggaaacacgtaggcctgataagcgaagcgcatcaggcagttttgcgtttgtcagcagtctcaagcggcgcagttacgccgcctttgtaggaattaatcgccggatgcaaggttcacgccgcatctggcaaacatcctcacttacacatcccgataactccccaaccgataaccacgctgagcgatagcacctttcaacgacgctgatgtcaacacatccagctccgttaagcgtgggaaacagtaagcactctgacggatagtattatcgataaacgccggatgacacatcacctccagcgaacgatcaccccgatggcctgcgtcatccagcacttgcaggaacagcgactcactgatctcttcaccgtagaatgcactgctgaatccctgggtagtgcgcaggttgaccggcaaatcaaacgccatctgacgatccgcccgcaacgcaatgccctgctctgccgcaaacctggcaacaatcgggaaaatctgcgggaacatatgcacatgatgatggctatcaagatgcgtaggtttgcgtccaaatagctcaatgaaacgcaaatactgactgacaagctcctgagtaatttcttccagcggtaaagcatcttcttctgccaactgccagatccattttcccagcacaccatcgcgggttaaccccggcatagctgtcagtggcttacccatagtaaggacaaagtgcatccctatggccagactcggttcatcacgactcaactgcaccgcatggtcaatagcctgcccattcaccagcgccgtcgtcgacgtgacaatcccattgcgacaggcctcgataatgccgtagttctgacctttgcttaagccaaaatcatcggcattaacaatcagtaagcgttccataatcagcctcggttaatgtgcttttttaagctctgcgatgcagtcggcaaagtttggcagccatttctcgtgcgccagaatcatctcgcgtgccagcagctcagcatcgcgatcggaatgcaccaacggactaaggtttagcgccagtaacacatcgttaaattctccgctaagtgcggcgttactggcagcaatctcgaagcctttaatggtgtgaatcagccccattactttatcatcgaaatgcgtaatgcgcggatgtggcgtcgcgccatcgcgccccagcttacaggtcatttctactgcccagtctgccggaatattatcaatctgcccatgatgcgggatattaacgtaatgttctgcttgcttgtcgttgtagatagcgttgatcacttcgcatgctgcatcagagtaataagccccaccgcgctgttccagttctttcggcttaactttcagctcaggatttttatacagctcaaaaagttgtttctcgactttctgtactacctgcgctcgtgcgccgcctttgtagtattcgcccatttcaatagccagcatctctttctgcttgaagtaatacagcagataagaacatggcagcagattcaacgaacgaattaagccctcactaaatggcagatcgaaaatattttttacagaggacgcttttaactgccctgacgccacaccatcaagcaattcggcaaagcgcgacttgccatttaccagcacatccttaatgaacaccatatggttgaggccgaacaaatcgatagataaatcatcgctgtctttcagcatcagaacatcgcgaataaacatcttcatgccgatcggaatattacacacgccgataaagcgtttaaatccggtatgacgataaacggcttcagtgaccattcccgccgggttagtgaagttaatcacccatgcattcggacaaagttcttcgacatcttttacgatgtcaaaaatcaccggaatggtacgcagacctttaaacaaaccgcccgcgccgttggtttcctgaccaagataaccatgacttaatggaatacgttcatccagttcacgcgccggtaattggccaacgcgcagttgggtagtaacgaaatcagcatctttcaatgcttcgcggcgatccagcgttttataaagcttcatcgggacgccagcgttatcaatcatccgttggcagagatcgaaaataatatccagtttcgctttaccaccttcgacatccaccagccataattcgctgaccggcaattcgtgataacgcttaataaatccttccagtaactccggggtatagctgctcccgccaccaatagtgacgacttttaatttctggctcataatttctcccttcagtacagaatactgatatctggcatatctgcccccccggacataaataatccagcaacaggacagatatgtgaattgtcaggtataacgacttactgattaaattcagtcaatttcttacgatagctcttaggcgtaaaggacgttaatttcttaaacgttttaataaacaaactcgggctactataaccggcctcaaacgcaatatccgtcactgaatagttggtcatttccagttgttttgtggcaaaattaatacggatttcattaataatctgcattggcgttttgccataatatcgttgagtcgctcgcgtcaaatattcctgtgatttggctgacaacgccaccatattctccagcgccgattcactgaactgctctttatcatgcatcttttctaccgtacttttcagccactgcggtacatcatcaatcacctgttcttcgcggtaatgacgtaaacggttaatgacataaaaagtaaccatctcaacaaactcttccagccctgtttcacggaaattcaatgaagaaatcactgtttccacataggtgagaaaagcgttattggtccggtatacctgcgaagcaacaaagcaataaggcaacaacggcaggtaatgctgctcaaaaaagcgtttactgatcccaacgttcaatatgcgcgtggcaccaaactcataaaaactttgatggtgcgaacctaacggaataaaaacaaaatcgccccgttccagtaacacgcgcttaccgttaatctcctggaaataacgcccggttaataccagagtaaattcataatagtcgtgctgatgcagtccgctgatactctcagttttgttatagataaacacatggaagtttttgccattaaacaactgctgttctcgggcagtggcaatttccggcgcgttaatcactggctgcatcatcgactccttatgccttcagtttttcatgaagctcaattaattcagtaatcagttcacgcgcaagcatggacgtcattaaatgatcctgagcgtggaccagcatcagactcactttcatcttaccttcgcccgcatcgccttcaatcagtttcgtctgtaccagatgcgcttcattcaatgccatccgtgactgatccatcatggcttttgctgcggcaaaatcgccctgcttcgcctgtttcagtgccgcatacgccaggctgcgcgcttgtccggagttgatgatcagccccatcaccacttcttccagctcttcagcttccgtttgcgtatcgggaatgttatcgagatccatcatacatcgttcctctcttttcttaccggcacgattacccgtaccggcatcgattaaaatttcagggcgttagcgatatcttcttcgctctcttctttatcaatcgcattttgtgctttgttagccaccacaacaaagggcagataaattaacgttgcgatgccaaggttgaagagtgcgaccagcaatgcggcgacgctaccgttggtgttaaagaaggctcccagaccggttggcatggtccacggtgcaatattggtcaccggaggaataatgcccatgtagtacgctgcgagggtgattgccgccagaatcggttgtaccagtacaaacgggataaacatcaccgggttcatgataattggcagaccaaacagaatcggttcgttaatctggaagatgccggacggcagcgccagttttgccacctgacgataatcagcacggcgagaggcgataaagatagccaggatcaggcctaaagtcgcaccactgcccccaaggaaaataaaggagtccagcatcggcttggcccagatatggaaggtcttaccggctgccagcgccgcttcgacggaaccatattgctgataggtcgcgatattttccagtgcccacggcgtcataatgccgttgtccagtgcggtcagcgccagcgcgccatgaataccgaagaaccagagcagtggaacaaagatcacataggcccagcccaccacgctacccaacgatgccagtggggttgagatggtatccataatgatctgatggaagttggtgccccaggtattcaacgcccaggcaataatccccatcacggaaagaataataaagccgggaattaatgccgagaaggaacgcgatactgaagcaggtacgctgtcgggcagtttaatgacccaattgcggcggacaataaaggtaaacatttctgccaccaccaggccaataataatcccggagatgatattcgccccacctaaccagtttgcaccaaccgcataggcctcaccgacactatatggggtgacggtcataaatgctgcaacggataacaacccagccgccagcgcatcgactttacgctcttctgccagcgccatgccaataaagaacggtgccattaaagacattattcctaatgttccgttatatacgttgccgccaatacctttcagaccattaagtgtttcaatggttgaggcgtcgaggcgaatacctaaggaataaaaaaacgacccctccccaaagcttagaaaaacgttgttaattaatacaaacatggcccccgcaagggttaacggcattaagcgaataaagccatttttgattgcattaacgtgtggctgctttcctattttaactgcaaaagggaggagtaccttttcaagcgatgcaataacattactcatagaaaaatacccttaaaaaccgcaatttaaatattgcggtattgatttatgaaataactctttgacgggaaaatttaaaataaattaatttgctgcggcttttttaatcgctgcaaccgcagccttaagcacgcctaaaccatcgactttgccataaagcagcgagtcaattacttcaaccggtttgttgggtaacaaacgctggatttcgggcaacatataagcaatctgcggccctaataacacgacatcggcattctgacctttttcaccagccagtgtttccggaaatgcttcaataatgaccggaacttcatatttttctgcctgtgcgcgcatttttgataccagtaaagaggtagacatgcccgcagaacaaaacagataaatgtgtttcttttccataaaactgccctcatcgacgattatctgtcagccagacactccgcaagccttaacctgcttccatgctctgggtaacttgcgaaaccaacatgactttttttgtggctgaaaggagtatacggtatagacctgagcaatagtatttctttgaccttataaattgtttctccttgacctgtggttatgaccctcttcacatttcgggcaaataattcgcgaagataattaagaactcaggccaaaaaaaaccggcgcaatggccggtttccgttgttactcaagctttcagacgaattgattacttcgcagcctgtggatcagtgtcgtattcagcacaggtctgataaccggagttgatgacatgtccggtatcatctaacgcgacaaagtaggtttctgctttaccatcacgttgacccaggatgtaggtctggcaagtaccgcgagcatggatcatgctcacttcagacgaaggtttacccgcaatttgtgcaacctgcgcccggctcatgccttttttgacgtctttcaccacaggctgtacaaactggtctttggtacgatcataagccgtacaacccgccagcatggttaataccgccgctgcactcagaattcctgccatattcttgttcatattccgtcctcttgtttatcagcgtgttagataagcctggaatacattgggcgctttttcaagcccgtgaacgaaacggctccgctttcagaggattcctgtatgacgttttaaccaccattcagcccgctgtcgcttgtcgtttcagtagcaacgggttagctttaaggaagttttgtcttttctgtctggaggggttcaatgacattgcaacaacaaataataaaggcgctgggcgcaaaaccgcagattaatgctgaagaggaaattcgtcgtagtgtcgattttctgaaaagctacctgcaaacttatccgttcattaaatcactggtgctcgggatcagcggcggtcaggactccacgcttgccggaaagctgtgccagatggcgattaatgagctgcgcctggaaaccggcaacgaatcactgcaatttattgccgtacgcctgccctatggtgttcaggccgacgaacaagattgccaggatgccattgcctttattcaaccggatcgcgtattaaccgttaatatcaagggcgcggtattggccagcgaacaggcattgcgggaagcaggcattgaactgagcgattttgtccgtggcaatgaaaaagcgcgtgagcggatgaaagcacaatatagcattgcgggtatgaccagcggtgtcgtggtgggcaccgatcatgcagcagaagccattaccggattcttcactaaatatggtgacggcggtacggacattaatccgctgtatcgtctcaacaaacgtcagggtaaacagttactggcggcattagcttgcccggaacacctttataagaaagcgccaacggccgatctggaagatgatcgcccttctctgccagatgaagtggcactcggcgtgacctatgacaatatcgacgactatctggaagggaaaaacgtacctcaacaggtcgccagaacaatagagaactggtatctgaaaaccgaacataaacgccgtccgccaattaccgttttcgatgatttctggaaaaagtaataatttgcacatattggattgtgcgaaaaagagtaatttgttcacgccggatgcggcgtgaacgccttattcgacctataaaactatgcaaattcaatacattgcaggagtcgaataggcctgacaggcgtagcacgtcagacggtgtaacctttgtcatcgacccgcctcttttttaatcgcttcccgcctgttacactggatagataaccagcattcggagtcaacagtggtacggcgtttaacttctccgcggctcgaatttgaagctgcggcaatttatgaatatcccgaacatttacgttcattccttaatgacttacccacccgaccaggggtgtatctgtttcatggtgaaagtgacaccatgccgctctatatcggcaaaagcgttaacatccgcagccgcgtcctttctcatttacgtaccccggatgaagccgccatgctacggcaatcccgacggatcagctggatatgtaccgccggtgaaatcggcgctccgctccttgaagcgcgattaatcaaagaacaacagccgctgtttaataaacggttgcgccgcaatcgccagctctgtgccctgcaattaaatgaaaagcgcgtcgatgtggtgtatgccaaagaggtggatttttcacgagcccccaacctgtttggcctgtttgccaataggcgcgcagctttgcaagcattgcagaccatcgctgatgaacaaaaactttgttatggcctgctgggactggaaccgttaagtcgcggtcgtgcatgttttcgttcagcgctaaaacgttgcgccggagcatgctgcggtaaagagagccatgaggaacatgcgctacgcttgcgccagtctctggagcgtttgcgggtggtgtgttggccttggcaaggggcggtggcgctgaaagaacagcacccggaaatgactcaatatcatattattcaaaactggctgtggctgggggcggttaattcgctggaagaagcgacaacgttaattcggacacccgccgggtttgatcacgacggttataaaattctttgtaagccgctgctttccggtaactatgaaattactgaacttgatccggcgaatgaccagcgagccagttgatttcactgaacaacagtttaccttgcggttgtaaaagccgcagggtgtgcctgccatcgaaccagcacgcgccctggtcggtagtgagcaatttatcgcccagttgccacgccccgttaatcacaaacaccaccccgccgcgtgagccaaaggtagtaaacgtacgttcggcaattctgactttcgccttacagacatccaggcgtgtcatgatgttgaaatccatcgacatctgccctgccgtcagtttcgcttttaccacctggtccgctgcaaaggcaaaaggctggaacggttttaaggtatggttaaagcggtctgcgctttcaaggagcatctcaccgccttccagcaacgtcactatcctttccatgccgggaaacaaagaaaactccccattcgccgcgatggatgcaatgctggcacgccagtaaaaatcacgttttgccggtgggaacgtgcaaatttcgcgcgtttcaccggcagcatttcgccacagattcaccgacattttacgcatatcaaagtattccatactcgctcccggcccgttcttttcattgttatcgttcaggtaaccgtggatggttatcggcaactcgggtgatttacgttagtggtgatcaggctttttttacaactgtttgagaagagaaaagaaaaccgccgatcctgtccaccgcattactgcaaggtagtggacaagaccggcggtcttaagttttttggctgaaagattattcagcagttgcaggcattttaccttttgccgctggacgttctgtcagacgcttctcaaaattagcattaaattgctttttctgttccggcgtcaggatgttgtaaattttgttctgggtttccatgtgcgtcagcatgttagctttgcgctgttcttccatttttgcgatctgcgcttcagcttttactttatcgaaggtatcgctggcaatgatgtcatgcattgcgcggcgttcttccagcggcggacgtttcatctggtcacgctggcctttcatgatttcgcggatctgctgtttctgcgcgtcggtcaggttcaggtctttgaacatcatgtcctgatgcggaccgaacttgcctttgtggtgcatcatcggcttcgcgtcagccggtgctgcggtagtggtgtctgcggcatgggccaggttagccgcgccaagagccagggtagaggcaacaaacagtgcagttaatttacgcatattctatatccttcctttcagttatttattacggctttcttaagtagcgtgccgtgttgacgagattaactttactgactttagcgtcaattaatcagagcaacggtaaaacaatgaaagtgtaaaaaacacttttgcgccaattatggagaaaaaaagaaaatttgatggagagtgatgagagaatattacaacacgatgattttgcagagattatgaagaactataccggatgactggtgataaataaagcaaataaccaggattaatctgtattaatttataagaaagcaacttaatacccgcagaatgatttctgcgggtaagtattagcttattttttcgagcattaatcccgcgcgtaatcccaacgctaccaacggattagggaataacacatactctacatcatgggttacggtaaaacgttcctctccgtcctgcgccagcaatgttcctttctcaaacggcataaaattcagcgtgtcacttgccatatgcatttcgaaggacggcgagtggcgagtaatttgcgaaaccacccgataacggagcggcggtgttctcacgataccgacactctcaccagatagcagcgcagcaattgcgctggcagttactgcaaactggcgaagatcgttttgcccaaagggcaacgctttgccaagttccagcgtacaggccagcgcgccaaaatgtctggcgctgaaatgggtaaacgtaccaccaggttcctgatggaacaccagcgcctccagccccgccgcacccagccacgtcagaaatttctcgtcccagggaatgtcgcgttgcggtaatacaccgaactgcggatgcaaggagccacgaattgcggtatgtagatcaaggtgccagcgcacagattctttgccctggtcataaaaatcttccaggcactgttccagttcgcgcgcccgacaggtttctccgctttcagcaaatagctgccaacgaccgccaaacattcgattcatatcgctatggcaataacgtttcccttgcttcagcgcaggaggattcccgaggatcaccagcaaccgccaacgtaacgggatctcgccgtgagatatcgcgccaagcaacgcgtccagcatctccacaggtgccgtctcattaccgtgtattcccgctgaaatcaccagtgcgccttgcggtggcgttaatggcgtcagttccagcacaccatcgcccagccagcgccagcgaacgccgttgatttctcgctcggtgataaccggttttttacccgttaaggtcagagcaagaaaattatccattgccccctccctcgcgctggaacggataaaccgaaccgagattcagtaattggctcaatacatccagtgcttcccgcccttcgcgcagcaattgcgggtcggccagatcggcagcagtaaggcgatcgcggtagtaacgatccacccagtcattgagcgcattaaacagcgtatcgttcatcatcaccgccggattcaccgcccggcgttcttcttctgtcaataccacccgcaaccgcaggcacgccgggccgccgccattcgccatgctttcacgtaaatcaaagacttttagttcgctaatcgggttgtcagcggcaaggagttcattgagataaccccatactccggcgtgttcccgacactcctgaggcagcaccaacatcatggaaccatcatcgcggctcagcagttggctgttaaacagataggtagacaccgtatcagacacggaaacctgagttgccggaacttctatcgccataaaaccattgacccgcgcacgcaggtttgccagtaactgtgactggcgagcgaacgcctgttggtggcaaaacagcacctggcggttactcacggcaatcacgtcattatgaaaaacgccctggtcgataacgtccgggttttgctgggcgaaaatcacctgttggggattcacctgattcagccttgccaccgcctcgctggcttcgcgagtctgtcgcgccggataacgggaaggccgggtatcattgccttcttctcgcccgtagacaaaaagttgcatacccggctcaccgtaatgaccgccgagacgattgtggtttgccgccccctcatcaccgagcaacgctacctgcggcaacgccgaatggacgctaaatttctcttcgtcgttaaaaatagcttttaacagcgattcagtgacgggcgcttccagcgaacggtgaaatttattgttcaggttggcaacggtgagatgcactttgccatccagcgtatcggcagatggcgcgatcgttgccgcattggctacccacattggcgaagcggagctgacgctggaaagccagtgcggtgcctggcgtgcaactttttccagtacctgctcatcgctaccgctgaatcccaactgacgcagcaccggaataaacggacgctcgtgcggctggatcacggcctgggggaatcccgcatcggcaagggctttcattttcagtaagccctgcttcgccgccagtcgcgggttagacacctgaaaacggtgacgggtagaggcttcattaccaaacgacaggcccgcgtaatgatgcgtcagccctaccagcccgtcgaaattaacttcccaggcgttcatcgcaccacctcatcggaaaaatccagcccggggttaagcgttgcgggcaaagttaacgagtccgactccaggctcgccataggccatgcgcagtaatctgcggcataccaggcgctggggcgatggttaccggatgcaccaatgccgccgaatggcgcggtactggcagcaccagtaagcggtttgttccagttaacaatcccagcccgcgcctccagcaacagttgatcgaatttttcccgctcgggggaaaccagaccgcaagagagtccgaagcgagtgttattcgccattagaatcgcttcctcgaaagaatcataacgccagacgcgcaaaagcggcccgaacacctcttcatctggtacgccagcaacgcctgtcattttaatgatccccggcgtcagcaacgatgtctctgattgtaataagcgcggcgcaagcagggttcgtccgcccatcgcttccagttgctgccaggcagtaaccacctgctgtgcggcctgttcagaaatcagcccgccaataaacggctgcggttcgtcatcccagttgcccggcgttaatcgctggctgacggcaaccagacgagcaagaaacgcatcgccctgcgctccgcttttgagcaataaacggcgggcgcaggtgcagcgttgcccggctgtgacaaacgccgactgaatggtcagatggacagccgcgtcgatatccgccacctcatcgataattagcggattattaccgcccatctcaagggcgagaattttctccggctgaccggagagctggcgatgcagctggtagccggtattggcgctaccggtaaacagcaaaccgtcgagatcctccagcgcactcagcgcctgacccgtttcacgcccgccctgcaccaggttcagtacgcccggcggcaagccagcctgctgccataaacgcattaccgcttcgccactccacggtgtcagttcgctgggtttaaagataatggtgttacctgccagcaatgccggaacgatatgtccgttcggcaaatgaccagggaaattatacggcccaaacaccgccagcacgccgtgcgggcgatgtcgcaggctcgccgcaccgtccggcatttcactacgctgctcgccggtacgaacgtgatacgccttaattgatatcgcgattttattgatcatcgccgtcacttcggttgccgcttcccagcgcggcttacccgtttctctggcaataatcgcggttaattcggctttattgctttccagcaatccggcaaagcgttcgacaacgacctgacgttcagccaatgagagccgcgcccagcgcggaaacgccgcacgggctgcccgacaagcctgttcgacctgagcggcaccggcatcattgccttgccataacacctcgcccgataccggattacgcttcacacgcgatgcgccctggcccgttatccagtcaccgttaatccataaagtcatgctgttttctcctctgcgcacaggcgcaccagacgaacgcgatcccctgcgtggcatttgagggcatccagttgtgcggcggttaaaatcaaacgctcggttgccggatcggtacgcaccagcaccacgcggaaatggtgataattttcattggcgaccaggcaggccggaaaatcgccctgcgcaggctgcccttctgccacttccaccagccgacttttacggatggcgcgcacgcggtcgatgtcacactcaagcgttggcccgccgtcgaagatgtcgatatagttgcggtaacgaaaaccttctttctccagcaccgcgcgggcaggcgcggtttgcggatgtacctgaccgatgacgtcctgggcttcctgggataaaaagtgggtatagatcggatgtttcggcatcagttctgcaataaatgccttttgcccggtgccgcagagaaaatcggcgcggctaaaatccatcgaaaagaagcgtttaccgaggctttgccagaacggtgaatagccgtgttcgtcaatcaccccgcgcatttcagcaaccactttgtcattaaacttgtcgcgaaaagccgccataaacataaagcgcgatttcgacagcaaatagccgttgccctctttgcgccagtccgggtcgagaaacagcgtgcacagctcgctgctgccggtgtgatcgttactgagaaacagcgtcggcaatgcgttatagacattcagctcttttgaggcgtgaaccaacgtgccgacgcgatagttgtaccagggatcgttcagcccaaccgccacctcaatggcacaaatccccgccacggtgcctgtctcgctatcttccagcacgaacacatagccctgctcacttttgggcagttcgccttgccaggttttgattgccctttcgatacgcgccgaaagcgtggcttcattggcgggaagcgacgtcaggccgccgcccgttttgctggcaagctgcatcagcgccgagacatctgatcgctcaacgggacggatgaccatcatgatgaacctcggctaacaaagtgttcgcaagcagctgcaaagcgatccagtccggtcgtcacctcttcttcgctgacattgagcgcaggcgcaaaacgcaccacgttgccacctgcaatcagtaccatcacgcctgctttcgccgcttcctgagagatctgtttcgcttgcccggcgtaatcggcattcagcacacagccaatcaacaaacctaagccgcgaatttcgctgaacaaaccgtagcggtgattaagggtattaagacgctcaacaaaccagtcgtgacgctgtttaacgccattaagcatctcaggtgtgttgatgagctccagcactttgcctgccaccgccgaggccagcggattaccgccataggtggtgccatgagtgccaacggtcatcacgcgggcgcactcttcggttgccaacaacgcaccgaccgggaaaccgccgcccagcgctttggcggtagttaacagatcaggcgtcacgccgtagtgcatataggcatacagttccccggtgcgcccgacgccggtttgtacttcatcaaaaatcaacagcgcattgtggcggttacacaattcacgcagaccttgtaaaaacgcgttgctggctggcaccacaccaccttccccctggatgggttcgacaatcaccgcacaggtagagtcgtcaatcagcgcgctggcagagttaatatcgttatatgcagcatgacgaatatccgccggcagtggcgcaaaatcctgtgaataggctggctgcccacccgcactgacagtaaacagcgtgcgaccatgaaacgcatttttgaacgccacgatgccgctcttatggctgccgtagcggtcgtgagcgaatttacgcgccagttttagcgccgcttcgttggcttccgcaccggagttacaaaagaagacgcgatcggcaaacgtggcgtcgatcaattttttcgccagtcgcagtaccggctcgttggtgtaaccgttgccggtatgccagaacttactcgcctgttcgttcagcgcttcacgcagttccggatgcgcatggcccagcgcgttcaccgcaatgccacccgcaaagtcgatatactctttcccctgctgatcccacaagcgcgaaccttcgccacgtaccggtataaagggtgccggagcgtaaacaggtatcatccattcatcaaagttttcacgcgtaattggctgagacatagcgacctctacagtaaataattcgttatttatatgttaacaataagtaatgtctgcgctgtaaatgtagattgcagggttcgtgccagccagtgataaaagtgcataaacggcggaggctaatgggaaatcaaggagttataaccaaaccatatgcatttaaagtgcatataaagtgaatacgtttgcgatgtgggtgaataaaaagaataaaaaacgcaatgttatgcagaagtaaaatataattctggaattgtgatcattgacgaaatttactggaaattactgcgccattctgacgcagcgcgcaccaaaagcgggcattttttgcgccatcgttgacatcattaacaaccatcgatcaaatcacttaacaacaggcggtaagcaacgcgaaattctgctaccatccacgcactctttatctgaataaatggcagcgactatgaaatttgtctcttttaatatcaacggcctgcgcgccagacctcaccagcttgaagccatcgtcgaaaagcaccaaccggatgtgattggcctgcaggagacaaaagttcatgacgatatgtttccgctcgaagaggtggcgaagctcggctacaacgtgttttatcacgggcagaaaggccattatggcgtggcgctgctgaccaaagagacgccgattgccgtacgtcgcggctttcccggtgacgacgaagaggcgcagcggcggattattatggcggaaatcccctcactgctgggtaatgtcaccgtgatcaacggttacttcccgcagggtgaaagccgcgaccatccgataaaattcccggcaaaagcgcagttttatcagaatctgcaaaactacctggaaaccgaactcaaacgtgataatccggtactgattatgggcgatatgaatatcagccctacagatctggatatcggcattggcgaagaaaaccgtaagcgctggctgcgtaccggtaaatgctctttcctgccggaagagcgcgaatggatggacaggctgatgagctgggggttggtcgataccttccgccatgctaatccgcaaacagcagatcgtttctcatggtttgattaccgctcaaaaggttttgacgataaccgtggtctgcgcatcgacctgctgctcgccagccaaccgctggcagaatgttgcgtagaaaccggcatcgactatgaaattcgcagcatggaaaaaccgtccgatcacgcccccgtctgggcgaccttccgccgctaatttagcagctctcctggctcaaactgggtcaggagaattaaccttgagaaaaatcaacaaactgtcagtaatgatttgttgcctgccgtcctttgttataccgtcactgcgtttttagttgtctgaccacttctctattatcaagtttgatataggaaactccacgatgaacgctgagcgtaactttctgtttgcctgtcttatttttgcgctggtcatttacgctatccacgctttcggtttattcgatctgctcaccgatttaccccacttacagacactcattcgccagagcggattgttcggttatagcctctatattctgttattcatcattgccaccctctttctgttaccaggaagcatactggtgatcgctggaggaatagtttttggcccgctcttagggacactactctcattaattgccgcaacgctggcctcctcgtgctcattcctgctggcgcgctggctgggacgtgatttactgctgaaatacgtgggccatagccataccttccaggccattgaaaaaggcattgcgcgtaacggtattgattttcttattctgacccgcttaatcccgttgtttccttacaatattcaaaattacgcttacggattaaccaccatcgccttctggccttatacccttatttcggcactcacgaccctgcccggtattgttatttataccgtgatggcaagcgatctcgccaatgaaggcattacgctgcgctttattttacaactctgtctggcgggcctggcgctgtttattctcgtccagctcgcaaaactctacgcccgacacaaacatgtggatctgtctgcttcgcgccgcagcccacttactcacccaaaaaatgaaggatagaacgatgtcgcaacattattcagtgtcatggaaaaaaggactggctgcactctgcttactggctgttgccgggcttagcagctgcgatcaaaaagagaatgcggcggcaaaagtggaatacgacggactttcgaacagccaaccgctgcgcgtcgatgccaataaccatacggtaaccatgctggtgcaaattaatggtcgtttcctcaccgacgacactcgtcacggtattgtgtttaaagatggctccaacggacataaatcgctgtttatggcttatgcgaccccgaaagcattttatgaagccctgaaagaggcaggtggtacgccgggcgaaaacatgacgatggataataaagaaacgactcatgtcacaggcagcaaactggatatttcggtcaactggcaaggggcggcaaaagcgtattccttcgatgaagtgattgttgacagtaatggcaagaaactggacatgcgctttggcggtaatttaacggcagcagaagagaagaaaacgggttgcctggtgtgtctggatagctgcccggtcggcatcgtcagcaatgcaacatacacttatggtgcggtggaaaaacgcggcgaagtgaaattcaaaggcaatgcctcagttctcccggcggataacacgctggcaacggttacctttaaaatcaccgaataaagccaggataaaggatgatgaagatacaatcgcgtaaaatctggtactaccgtataaccctcatcatcctgttgttcgctatgctgctcgcatgggcgctgcttcccggcgtccatgagtttatcaatcgcagcgttgcggcgtttgccgccgtggaccaacagggtatagaacgctttattcagtcttacggcgcactggcggcagttgtctcgttcttgttgatgattttacaggccattgctgcaccgctacctgcgtttttgatcacctttgccaatgcgtcgctgtttggcgcgttctggggcggcttgctgtcgtggaccagttcgatggccggcgcggcgctgtgcttttttatcgccagagtgatgggccgcgaagtggtggaaaaattaaccggcaaaaccgtgcttgacagtatggacggctttttcactcgctacggcaaacacaccattctggtctgtcggttattgccttttgtccctttcgatccaatcagctatgctgccggtttgacttcaatacgttttcgctcgttttttatcgccaccgggcttggtcagttaccggcaactattgtttattcctgggcgggcagcatgttaacaggcggtactttctggtttgtcaccggactgtttattctgtttgccctgaccgtggtgatttttatggcgaagaaaatatggcttgaacgccagaagaggaatgcctgatgggtttaccgccgcttagcaaaattcctttaattttacgtccacaggcgtggctgcatcgtcgccattacggcgaggtgctaagccccattcgctggtgggggcggatcccgtttatcttttatctggtgtcgatgtttgttggctggctggagcgcaaacgctcaccgctcgatccggtagtacgatcgcttgtcagcgcgcgcattgcgcaaatgtgcctgtgtgagttttgtgtggatatcaccagtatgaaagtcgccgagcgcaccggcagcagcgataaactgctggcagtggctgactggcggcaaagcccgctctttagcgatgaagaacggctggcgctggagtacgccgaagccgcaagcgtaacgccgccaacggtcgatgatgccctgcgtacccgactggctgcgcattttgacgctcaggcgctcaccgaactgacggcattgatcggcctgcaaaatctgtcagcccgttttaattctgccatggacattcccgctcaggggctgtgccgtattcctgaaaaacgttcttaaggagagatgatgcgccattgtgggtggttgctgggattgttatcgctgttttctctggcaacacatgccagtgactggcaagaaattaaaaatgaggccaaagggcaaaccgtctggtttaacgcctggggcggcgataccgcaattaaccgctatctcgactgggtgagcggcgagatgaaaacccattacgctataaacctgaagattgtccgtctggcggatgccgcagacgcggtgaagcgcattcagaccgaagccgcagccggacgtaaaacgggcggctcggtggatctgctctgggtgaacggcgaaaacttccgcaccttaaaagaggccaatttattacaaacgggctgggcggagactctgcccaactggcgctatgtcgacacacagctgccggtgcgggaagatttttctgtgccgacacaaggtgcggaatcgccctggggcggcgcacaactgacgtttatcgcccgccgcgatgttacgccacagccaccacaaacgccgcaagccttactggagtttgctaaagccaatcccggcacggttacctatccgcgcccaccggactttaccggcacggcgtttcttgaacagttgctgattatgctgacgcccgatcccgccgcattaaaagaagcgccggacgatgcgactttcgcccgtgtcactgtgccattgtggcaatatcttgatgtgctgcatccgtatttgtggcgcgaaggaaaggatttcccgccttcgcccgcgcggatggatgctctgctgaaagccggcacattgcgcctgtcgctgacctttaaccccgcgcatgcgcagcaaaaaatcgccagcggcgatttgcctgcaagcagttacagttttggctttcgcgaggggatgattggcaacgtgcatttcgtcaccattcctgccaacgcgaatgccagtgctgcggcgaaggtagttgccaatttcctgctctcacccgatgcgcaactgcgtaaagcagatcccgctgtctggggcgatccttctgttctcgatccgcaaaaactgcctgacgggcagcgcgaatcattgcaatcaagaatgccgcaggatctgccgccggtactggctgaaccgcacgcaggttgggtaaatgcgctggaacaagaatggctacaccgttacggtacgcattaatctttttgctgtgggcgatggtggcggtgatttatgcaccgctgatcccggcagctctcacgctgatatcgcctgctttgtcgttgacacactggcaggcgttatttgccgatccacagttaccgcaggcattactggcaacgctggtgtcgacaaccatcgcggcggtcggggcattgttgattgccctgctggtgattgtggcgctgtggcctgggccgaaatggcagcgtatgtgcgcccgtctgccgtggctgctcgccattccccatgtggcttttgccaccagcgcccttctgctctttgctgacggagggctgctttatgactatttcccgtatttcactccgccaatggaccgatttggcatcggtctgggcctcacccttgcagtgaaagaaagcgcatttctgctgtggatcttagcagcagtattgagcgaaaaatggctgttgcagcaggtcattgtgctggattcgctgggctacagccgctggcaatgcctgaactggctgctgttgccctccgtcgcgcctgcgctggcaatggcgatgctggcgattgttgcctggtcgctgtcggtcgtggatgtggcaattattctcgggccaggtaatcccccgacgctggcggtaattagctggcagtggttaacccagggcgacattgaccaacaaacaaaaggcgcgcttgccagcctgctgttgatgctgttactcgccgcctacgttttgctgagctatctgctatggcgcagctggcggcgcactattccccgcgtagatggcgttcgcaagcctgccacgcctttattgccgggcaatacgctggcgatttttttacccttaaccggtgtgctgtgtgtggttctgctggcgatcctcgcggatcagtcgacgatcaatagtgaagcgctcatcaacagcctgacaatggggctggtggcgacattcatcgctttgctcctgttactgctgtggctggaatgggggccacagcgtcgccagttgtggctatggttgcccattttattacccgctctgccactggtggcgggccagtacacgctggcgctatggctgaacctggatggaagctggacggcggtggtctgggggcatctgctgtgggtaatgccatggatgctgtttatcctgcaacccgcctggcagcgcattgattcacggttaattttgattgcgcaaacactgggctggtcgcgggccaaaatcttcttttacgtgaaatgtccgcttatgctacgccctacgctgattgccttcgcggtgggatttgcagtcggtattgcgcagtatatgccaacgctgtggctgggcgcggggcgttttccgacgctcaccactgaggcggtggcattaagcagcggcggcagcaacggtattctcgccgcccaggctttatggcaactgctattaccgcttattatttttgccctgaccgcgttagtcgcaaaatgggtaggttatgtcagacaaggactccgctaatgctctgcgtgaaaaatgtttcgctacgtttaccagaaagccgcttgctgacaaacgttaactttacggtggataaaggtgacattgtcacgttaatggggccgtctggctgtggaaaatccactctgttttcatggatgattggtgcactggccgaacagttttcttgtacaggtgagctatggctcaatgagcaacggattgacatcctacccaccgcacagcgtcagattggcattctttttcaggatgcactgttatttgaccagttcagtgtcgggcaaaatttactgctggcgctaccggcgacacttaaagggaatgcccgacgtaatgccgtgaatgatgcacttgagcgttcaggccttgagggagctttccatcaggatcctgccactttgtctggcggtcagcgagcgcgcgttgctctactacgcgcccttctcgcccaaccaaaagcgttactcctggatgagccattcagccgtcttgatgtggctctgcgcgataattttcgccagtgggtgttcagcgaagttcgcgccctggcgatccccgtcgttcaggtaacgcacgatctccaggatgttcctgctgatagttctgttctggatatggcgcagtggtcagaaaattacaacaaactgcgataacgcaaagtttttctcaatgcgtcagttcagaatggcgcactcaaaactacaatgtcgggattttcgatgaaacgtgtttctcaaatgaccgcgctggcaatggctttagggctggcttgcgcttcttcgtgggccgctgaactggcgaagcctcttacacttgaccaacttcagcaacaaaatggcaaagcgatagatactcgccccagcgcgttttataacggctggccacaaaccttaaatggcccttctggtcatgaacctgccgccttaaacctctctgctagctggctcgacaaaatgagcaccgaacagctcaacgcgtggatcaagcaacataacctgaaagccgatgccccggtggcgctgtacggtaatgacaaagatgtcgacgccgtcaaaacgcgactgcaaaaagcaggttttacgcatatctccattctgagtgacgcgctaagcgaaccttcccgtctacaaaaactgccgcactttgagcagctggtttatccgcaatggctgcacgacctgcaacaaggtaaagaggttacggcgaaacctgccggtgactggaaagtcattgaagcggcctggggcgctcctaagctttaccttatcagccatattcccggtgctgactacatcgataccaacgaagtggaaagcgaaccgctgtggaacaaagtttctgatgaacaactaaaagcgatgctggcaaaacacggcattcaccatgacaccacggtcattctgtacgggcgtgacgtatacgctggagcgcgtgtggcgcaaattatgctctacgcaggcgtgaaagatgtgcgtctgctggatggcggctggcaaacctggtccgacgcgggactgcctgttgagcgaggaacgccaccgaaagtgaaagcggaaccggatttcggcgtgaagatcccggcacaaccgcagttgatgctcgatatggaacaggcccgtggactgctgcatcgccaggatgcatcgctggtgagcattcgttcgtggccagaatttatcggtacgaccagcggttacagctatattaaaccaaaaggtgaaatagccggagcacgttggggacacgctggtagcgactcgacgcatatggaagattttcataacccggatggcaccatgcgcagcgccgatgatattaccgctatgtggaaagcgtggaatatcaaaccagagcagcaagtttcattctactgcggcaccggctggcgcgcgtccgaaacctttatgtacgcacgcgccatgggttggaagaatgtttccgtgtatgacggcggctggtacgaatggagcagcgatccaaaaaatccggtagcaaccggtgaacgcggcccggacagtagcaaataacattgcaattactgacgctggagcgacttcagcgtcagatacccactccacacccgcgtaaaggtcgtcatccagcacaacgcaccgaagatccacgcaaaccacgcaaaccatgcagggaataaacatcccagcacaaacagtaagatcgtttctgtgccttcggttaatccccccagatagtaaaacgacttatgtgcataaccggggttatcaatctgatgttttgctgccagtgcagcaaaggcgagaaaactgctgcccgtgccgataaacgcaaacaacaaccagccgcctgccagcgcattttgctccggtgcagcaagaataaagccaaacggcaccagcgcgtaaaagagaaaatcgagagaaatatcaagaaagccgcccgcgtcggtaagctctctgcgccgcgccagcgcaccgtctagaccatcaagcagcctgttcaacaaaatgacgactagcgccgccagataccagcccagcgccagaaacggcagagccagcacgccgatggcaaatcccactaatgttaaaccatctggcgtaatgcccggtttatcaagaacccgcacgcattgatgcaacaacggtttaatccggggatgaagatggcggtctagcacaggcactccttaaatataaagcctttctgattgagcaacagtgcggatattatggcatttttcgcttatctgcccgtgtgtaatttatgaaaatgattgaagttgttgccgccatcattgaacgtgatggcaaaattttactcgcgcaacgccccgcccagagcgatcaggcgggattatgggagtttgccggtggtaaagtcgagccggatgaaagtcagcggcaggcgctggtgcgtgagttacgcgaagaactgggcatcgaagcaactgtgggtgaatatgttgccagccatcagcgagaagtttcggggcggattatccatcttcatgcctggcacgtacccgacttccacgggacgttacaggcacatgaacatcaggcgctggtctggtgctcacctgaagaggcgctgcaatatccgctggcccctgctgacattccattattagaggcgtttatggctttacgcgccgccagaccagcggattagtgctaagggttttgtcatcacgctggcattgcagcagtattccttcggctttaattaccgccccttcagaataattttgatcctgataaacgcagcactgagtacagggctgcgctgactgcccgcctgaactgaacacttctggcggtacgtttacctccacgtccggacgataatgcgggttagccagtgcaattaatggaaatgctaatactacggcgaacaatgctcgactcacagggaactccttaacgttattgtctctgctactgataacggtagccgggtggcaaaactttagcgtctgagttatcgcatttggttatgagattactctcgttattaatttgctttcctgggtcatttttttcttgcttaccgtcacattcttgatggtatagtcgaaaactgcaaaagcacatgacataaacaacataagcacaatcgtattaatatataagggttttatatctatggatcagacatattctctggagtcattcctcaaccatgtccaaaagcgcgacccgaatcaaaccgagttcgcgcaagccgttcgtgaagtaatgaccacactctggccttttcttgaacaaaatccaaaatatcgccagatgtcattactggagcgtctggttgaaccggagcgcgtgatccagtttcgcgtggtatgggttgatgatcgcaaccagatacaggtcaaccgtgcatggcgtgtgcagttcagctctgccatcggcccgtacaaaggcggtatgcgcttccatccgtcagttaacctttccattctcaaattcctcggctttgaacaaaccttcaaaaatgccctgactaccctgccgatgggcggtggtaaaggcggcagcgatttcgatccgaaaggaaaaagcgaaggtgaagtgatgcgtttttgccaggcgctgatgaccgagctttatcgtcatctgggcgcggataccgacgttccggcaggtgatatcggggttggtggtcgtgaagtcggctttatggcggggatgatgaaaaagctctccaacaataccgcctgcgtcttcaccggtaagggcctttcatttggcggcagtcttattcgcccggaagctaccggctacggtctggtttatttcacagaagcaatgttaaaacgccacggtatgggttttgaagggatgcgcgtttccgtttctggctccggcaacgtcgcccagtacgctatcgaaaaagcgatggaatttggtgctcgtgtgatcactgcgtcagactccagcggcactgtagttgatgaaagcggattcacgaaagagaaactggcacgtcttatcgaaatcaaagccagccgcgatggtcgagtggcagattacgccaaagaatttggtctggtctatctcgaaggccaacagccgtggtctctaccggttgatatcgccctgccttgcgccacccagaatgaactggatgttgacgccgcgcatcagcttatcgctaatggcgttaaagccgtcgccgaaggggcaaatatgccgaccaccatcgaagcgactgaactgttccagcaggcaggcgtactatttgcaccgggtaaagcggctaatgctggtggcgtcgctacatcgggcctggaaatggcacaaaacgctgcgcgcctgggctggaaagccgagaaagttgacgcacgtttgcatcacatcatgctggatatccaccatgcctgtgttgagcatggtggtgaatgtgagcaaaccaactacgtgcagggcgcgaacattgccggttttgtgaaggttgccgatgcgatgctggcgcagggtgtgatttaagttgtaaatgcctgatggcgctacgcttatcaggcctacaaatgggcacaattcattgcagttacgctctaatgtaggccgggcaagcgcagcgcccccggcaaaatttcaggcgtttatgagtatttaacggatgatgctccccacggaacatttcttatgggccaacggcatttcttactgtagtgctcccaaaactgcttgtcgtaacgataacacgcttcaagttcagcatccgttaactttctgcgatagcagcagatatgccagtaaagaaatcccatttgactatttttttgataatcttcttcgctttcgaacaactcgtgcgcctttcgagaagcaagcattatataatgccaggccagttcttcttcaattgtcccgttttgaaaagctgtgcttgatatcgagatcatccatgataattccgccgcccatattagcttcgccgaggatttaccggagctatgattagcgcaatcagagatatagtctgagggaaaaacagcaaatttattcaacaaggcgataacctgctctggggcttcctccatgtttgctttaaaggtattggctccatggtcgccagaaagaaaatgctccattaaggcacaataactttcgctatcttcgataccccattgatcctctaaagactcgcgtcttttacttatgatatcgatcgagtcaaaaggaagcacatgatattggaaggtatctttgccaggttcaggctttcgcggccagaactccagcgtttcagaccattgcttatgatagaatcgataaggtgcgatcaattgtagcgcctgtaacttctcgatactgagcggctcaatacctttagcctgataataatgcagttgttctttttttgctttaaaaccggcccgaacaataagccccatcataattaatagataaagaaaagagcatcccgcggtaatcaggcctctttcattcaaaccgttggatgttatcgctgcgaacacaaacattacagcgacaacacatgttaaataaaacccccacttacaaagcagcatggccttattttctttaatcatccgttcaaaattactattaaatatttcccagccattaaaagaatacttctcgctcccaggatggttttgtaataaaacttttttcatcacattccctgttattacatactttagaggcgataattttatccatgcaaaaaaaatatccaacgaattttcttgatccgctggatatttcagaatatgactcgaatagcacgaaagattcactcgcttacgctatcgccccgcttccgacttcatctgctggcggactttttttcgcactacgtttacgcggtgcagcctttttcttatcagcactgccaccactgcccggagccacaatgccgcgaaactgccgcaccggcgtacgtttggcttgatcaataagctgatatagcgtccccaccagcggctgcataaagtcctgatagcgacactgcttttcgctgatttgcgtcagcaccgattcccagtgcgcggtcatgtccggtcgcgtcgccatctccggcagcgaatggaatagcgcttttccggcgtcggtggagtggatatagcgcccttttttggtcaggaaaccacgcttgaacaacagttcaataatcccggcacgcgttgcctctgtccccagaccatcggtcgcacggaggatctttttcagatctttatcctgcacaaagcgcgcgatcccggtcatcgccgaaagcagtgttgcatcggtaaaatggcgcggcggctgggtttgccgctctaccacttcacctttttcacacagcaactcatcgcctttcgccaccacaggcagtggcgtgccgtcgttttcttcatcgcgctctttgctgcctaacagcgtgcgccagcctgcttcagcaagaaaacgcgctttagcgacaaatttgcctttggcaatgtccagttcgataacacacttgcggaacaccgcatccgggcagaattgcatcagatactgacgggcaatcaggttatagaccttcgcttcgttctccgtcaggttgatcgcagaactccgtgcggtcggaatgatggcgtggtgcgcatcgacctttttgtcatcccaacagcggttgcgtatatctggatctaccactggctgcggcaacagatccggtgcatgaacactgatggcattcatcaccgcgtggcgtccggcaaaatgttcttctggcaaatagcgacaatcagaacgcggataagtgattagcttgtgcgtttcgtacagtttctggcagatatcaagcacgttctgcgcactcagaccaaaacgttttgccgcttcaatctgcaacgctgaaagcgaaaaaggcagcggcgcggattctgattcccgtttatcgttatagctggtgacaatagccggttgaccactaatgcggttaaccacatgctccgccagtggacgatgtaacaagcgcccttcttcatcctggtacggttcacacgcttcgctcggttgccagatagcggtaaaccgctcatcggcaggtgtcacgatatgtgctttgacttcaaagaagtctttcgccacgaagttttcaatctcttcatcgcggcgcaccaccagcccaagcacgggcgtctgcacgcgtcccacggaaagtacgccctgataaccggcattgcgaccgagaatggtatacgcacgggtcatattgatgccgtacagccagtcggcacgcgctcgcgccagcgcagaaacgcacagcggtacaaactcactgttggaacgaagacggtcgatcgcccgctcaaccgcctgcgggttcaggtcgtttatcaagcaacgctgtacctgctggcgcttttccggtgccagttgcagatagtccagcacttcatccaccagcaattgcccttcacgatccgggtccccggcgtgaacgatttcgctggcttcatgcaggaaccgtttgatgacgttaagttgtttggtcacggagggtcggggctgtaattgccacttttccgggacaatcggcaaatccgcaagattccagcgcgcatagcggctgtcgtaggcgtctggctgcgcctgctcaagcaggtgaccgatacaccaggtcaccacctgaccattaccgcactcgataaagccatcgcctttccggtgcggtttgggcaggacatcagcaatggcgcgcgccagactcggtttttcggcaataaacaaccgcattgaattaacgaatctcaaccatggcacaaccgccgcgcgctggcaccagttcgccaattgccgtcagttcaatgctaaactcggcggctgtagctttgacctcattttctgcttccggcatgaccgccagcagcaaaccgccagaagtttgcggatcacacagcagatcgcgcacttcacgcggcatttcacccatcagatgaccgtagctggcaaagttacgttcagtgccgccaggtactgcgcccaacttaatgtactcttcaacaccggggagtttcgggatcgcttcatagtcgacgcgtgcctgcacaccagccccctgacacatttcgctcaagtggcccagcagaccaaagcccgtaacgtcggtcatcgcttttacgccttcgatgttggcaaaggacgcgcctgcgatgttcatccggcacatcacttccgtcgccagtccctgatgttctggtttcaacagtgattttttctcagccgtggtaagaacgccgatccccagcggtttcgtcaggaacagtttgcatccggcttgtgcggtactgtttttcttcacccgctcggtcggtacgatccccgttaccgccagaccaaaaatcggctccggcgcatcgatggagtgaccgccagccagcgcaatacccgcctgacgacatgcatagcgtccaccttcggtcacttcgcgggcaatttctggggaaagtttgttaatcggccagccgaggatcgcaatcgccataatcggtttgccccccatcgcgaagatatcgctgatggcgttagtcgccgcaatgcggccaaaatcgaaaggattatcaacgatcggcataaagaagtcggtggtactgataacgctggtgccattgcccagatcgtacaccgccgcatcgtcgcgggtttcattacccacaagcaaattcggatcaacaaacttcgcctgctcactatgcaggatggtttccaacacttttggggaaattttacagccgcaaccagctccgtggctgtattgggtcaaacgaatcgagttctcgctcatggacatctcctgtcaatgcaatccgggtatggtaaccctcattccgtgaagtgataagtgagagtgtctgaattcctgcgcctttgctcacaatccagacagtttcgcgacaattatcagaaataagttacaaacggcgtcgggtccgggacgttaatcgacgtagatgctttcagctgcggcgtaccgaggtagagaaaaccgacaattttatcctgctcacggcaaccgaatgcttcacgcactaccggactttcagttaatgcgccactgcgccagatgccgccaaacccctgggcaactgctgccatttgcatcgccatgaccgcgcatccggcagacatttcctgttcccagcgcgggactttatgattctcttcgcatttcgccaccaccgtgatgatgagcggtgcgcggaacggcgcattacgggctttgtcgatagctttgtcatcactaccggcagcaatcgccccctgttccagtacggcgctgaaacgctcgcgcccttccccttcaatcacaaaaaaatgccacggttgcatggacttatggtccggcgcacgcatacccgcacgcaggatgttttgcagttgttcacccgttggcgcgggttcagccaagcgggaggcgctacggcgattgatcaatagttcgagtgcatccatttgattaactcctgtcgtgatatttattcacaaaattaacacgagagtggattttgttacagcacagtccgcaattcctgctgacaagtaccggttgggtcattacgataaccacatctattgcgcctgtgacaggtgtgaccttaagttgggagaatacatgcgaaccctttggcgatttattgccggattttttaaatggacgtggcgtctgctgaatttcgtccgtgaaatggtacttaacctgttctttattttcctcgtactggttggtgtggggatttggatgcaggtcagtggtggtgattcgaaagaaacggccagtcgtggcgcactgctgctggacatttctggtgtgatcgtcgataaacccgacagttctcagcggtttagtaaattaagccgccagctgcttggtgccagttccgatcgtctgcaggaaaactcactgtttgatatcgtcaacactattcgccaggcgaaggacgaccgcaatatcaccggtattgtgatggatctgaaaaacttcgcaggcggcgaccaaccgtctatgcagtacatcggcaaagctctgaaagagtttcgtgacagcgggaaaccggtttatgccgttggcgagaactacagccaggggcaatattatctcgccagtttcgccaataaaatttggctgtttccgcaaggcgtggttgatctgcacggctttgccaccaacggtctgtactacaaatcgttgctggataagctgaaagtttccacccatgtgttccgcgtgggtacgtataaatctgccgttgaaccgtttattcgtgatgatatgtcaccggcagcccgcgaagctgacagccgctggattggtgagctgtggcaaaactatctgaatactgttgccgctaaccggcagatccctgctgagcaggtattccctggcgcgccagggttgcttgagggtttaaccaaaaccggtggcgataccgcgaaatatgcactggaaaacaagctggtcgatgcactggcatcgagtgcggaaatcgaaaaagcactgaccaaagaattcggctggagtaagactgataaaaattatcgcgccatcagttattacgattacgcattgaaaacgccggcagataccggtgacagcatcggtgtcgtctttgctaatggcgcaattatggatggcgaggaaactcaggggaatgttggcggtgataccactgcggcacaaatccgcgacgctcgccttgacccgaaagtgaaagcgattgtcctgcgtgttaatagcccaggcggcagcgttaccgcgtctgaagtgattcgcgctgaactggcagcagcccgggcagcgggtaagcctgtggttgtatcgatgggcggcatggcggcatctggtggttactggatttccacgccagctaattacattgtggctaaccccagcaccctgaccggttctatcggtatcttcggcgtgatcaccaccgtagaaaatagtctggattcgattggtgttcataccgatggtgtctcaacttcaccgctggcagatgtttctatcaccagggcactgccgccggaagcacagcagatgatgcagttaagcattgagaatggctataaacgctttatcacgctggttgctgatgcgcgtcattcgacgccggagcagattgataaaatcgcccagggccacgtctggaccggtcaggatgcaaaagctaacgggctggtcgatagcctcggggatttcgatgatgcagttgccaaagcagcagagctggcaaaagtgaaacagtggcatctggaatactacgttgatgaaccgaccttcttcgacaaagtgatggacaacatgtctggttctgtccgggcaatgttgccagatgcgttccaggccatgttacctgcaccgctggcctcggtagcctctactgttaaaagtgaaagcgacaagctggccgcgtttaacgacccacaaaaccgttatgcgttttgcctgacctgcgccaacgtgcgttaagtcttgtactgagtggccgacagatcgtcggccacattattttttacgtcgacgaatcctcttcccgctgtctcgccccatatttccttatccgcatagtatcaggtgcgctcctcctgcctcacgtatatacttttgctctttcgatatcattcatatcaatatcatgcaaaagaaatcaatttacgtcgcctacacgggcgggaccatcgggatgcagcgttccgagcagggttatattccggtgtcaggtcatctacaacgccaactggcgctgatgccggaattccatcgcccggagatgccagatttcaccattcatgaatatacgccgttgatggattcttctgatatgactccagaagactggcagcatattgctgaagatattaaagcgcactatgacgactatgatggttttgtcattctgcacggcaccgatacgatggcatataccgcctctgcgctgtcgttcatgctcgagaatctcggtaaaccagtcattgtgacagggtcacaaatcccgctagctgagttacgctctgacggacaaattaatctgctgaatgcgttgtacgttgcggcgaattatccgatcaacgaagtaacgctctttttcaataaccgattgtatcgcggcaaccgcactaccaaagcccatgccgatggttttgatgcgtttgcctctccaaaccttcctccgttactggaagcaggtatccatattcgtcgtttaaatacgccacccgccccgcacggtgaaggggaattaatcgttcatccaatcaccccacaaccaattggcgtagtgacgatttatccagggatttctgctgacgtcgtgcgcaattttctgcgccaaccggtgaaagcattgattttgcgctcctatggcgtgggtaatgcgccacaaaacaaagccttcctgcaggaattacatgaagccagcgatcgcggtattgtggtggtcaacctgacacaatgtatgtccggtaaagtgaacatgggtggttatgccaccggtaacgccctcgcccatgccggcgttattggcggtgcagatatgactgtagaagccacgctaaccaaactgcattacctgctgagccaggaactggatactgaaaccattcgcaaggccatgagccaaaacctgcgcggcgaactgacgccggatgattaaggagactgcaatgccccctcgcgccctgttactggtcgatttacaaaatgatttctgtgctggtggcgcgctcgccgtgccggaaggtgacagtacggtggatgtcgctaaccgcctgattgactggtgccagtcgcgcggtgaagcggttatcgccagtcaggactggcacccggcgaatcacggcagttttgccagtcagcacggtgtagagccttatacgccaggccaactcgacggtttgccacaaaccttctggccagatcactgtgtgcagaacagtgaaggcgcacaattacatccgttactgcaccaaaaagcgatcgcagcggtgttccataaaggcgaaaatcctttagttgacagttacagtgccttttttgataacggccgtcggcagaaaacctctctcgatgactggttacgcgatcatgaaatcgatgaattgatcgttatgggcctggctactgactattgcgtgaagtttaccgtgctggacgcgttacagttaggttataaggtaaacgtgattaccgatggttgtcgtggcgtgaatatccagccacaggacagtgcgcacgcgtttatggagatgtcagctgctggggcaacgctatatacgctggcagactgggaagagacacaggggtaattttacgctggcctacaattctgtactggcattgtaggccaaataaaacacgtcagtggcacatctggcaattgatgccatcaacgaaagatttaattcacctcagaaatctcttccaacgacaccttccgcgtttcgatgccaaaaatggagagaaccagcgcacagagcaataacatgacaccaagtactataaacaccgtgatcgacccataatgtgttaataatgccgcaacgccatagggcgtgaagactgcgacgatccgtccgacggcattaacgaaacccgaaccgcgcaggcgtaaatgcgttggccaaagctccgggatataaaccgccgacgcgaagcaaacatacatgtataaaaagaagatcatcaccaggccatagattaaaatcgcccactctgtagtctgaattgaatagatatagcctaacacggcaataataataagtaaggtggagccaaataaccgacgaggaaaatgatcaataattaatgccgcaataaatattcctaccggagcgccaatcataataacagcggtcattaatattgatttatcgacatcaatgccggagttaacaaatatggtcggtatccatacggtgatggtataaagcgaaatgttcattgcaattaaaacagtaatcgcgactaatgtacgtcgtaacatttcacctttaaacaggagccagaaagtacccttgattactttaactttgctgttgctctgatacgaagtaagcgggggtaaacgaatactcttctctctttcaatttgctgctctacttcacgaagttggcattctgcacctgcgatttgccctttccctgccagccatcgtggcgactcaataaagtatttacctgagagaagccaggctaacagtatgccaataccacccaacagaaacattatccgccaactaaaaaaagcgataaccaccacacctatcgccgcagacagcatgggcgaccagttaccaacaaatgagagccgcgcggaccattttccacgcaccgtcgcggggataaactccgtaaatgaggcatagccaaccataatcagcgcccccattcctgttcccatcaggaagcgaaagaagatgagccagtacatatcagggacaaaagcggcccctgttgcagcaataccgacgatgagaagatttatgcgaaacgccctgcgccgcccaaagtaatcaccgatgaacccaccggtaagagagccgatgaaataaccaaacattaatgccgaggtaaaggcggcattgaggaaattatttgaccatccattgcttaccagctttgctaagacaacattaccggagtaactcaaaaaacccgttaataacagactaaagcttattataccaaatatacgataatgaaaccgggccaaaggcaagcggtccagtcttgcgccaatttgatcatattgttccattgggtgcctcggatttgctaaaaaaggtagcaattgcggcaaattcacttgccgcatctttatcatcattttatttcaaggcgcaggaacaaataatattgacaacgtgtgcttaaattaccacaccagctggatattattgtctttgcaaaatgctatccactctgcacccggtgatttatcagttattatgtaattaatatgactaaaatcagctaactggacaaaagctttgcgatcaaacttagagtgatcaaccaataacgcaacttctgtcgcctgacggatcattgtctttttgatttcagcttccgcttcattagagtccagcgcgccgctgttaatatcaagacctttacaactcattaccatgatatcgacatgatagcggctgatgatctctttagtaattcttccttgcagtgaaagtgtatttttgtttagttccccacccgttgaaacgactttaatttctgactgagccagaacatgaatcgcttccgccgagttggttagcaacgtcaggtcactacggtcctgtaacaatttgagcaattccattacggtactactggaatcggcagccatggtggttttattgtcgataaagggtagtgccttgcgtgcaataagctgcttctcttcataaaacgatgaagcgcgcttataaaaatggatattctccgtcaacatcgctgtatttaaaacagcaccaccataggttctggtcaaaaagccttcatcttccagcttctcaagatcgcggcgaatggtttcttcggttacctgaaaaatcccactcaaatttgagactgtcacttttttatcgttggcaaccatttgcttaattgcctgaatcctgtcttttgccgccacgattacacccctgtatctttttacatcacattagcgcgattatcgcataaccgatgtttactttcaaaacaacctgtttgaatcacagattttcatcacagttttcacagaaacagaggtgaatcgtgttgagtatttaacgctccagggcctctgccatttccctcatcaatgttgcgtctgcatccgataagttgataatcagtgccgcgacattttcgcgtacctgttccggtgcagtagccccactaagaatggagattaaatcactctgttttaatatccacgccagtgccagagtgggaattgtgcactgataacgagcacaaagtggctgccactgttcaagcatatcaatcactttcagcatgttttcacgctggaaccagactttatttgcccgagcgccgcccggaacgtaatcacgagtgatggtgccggtcaacaatccctgctctagcggggaataaacctgaaccacaatgccattatcacgacatagcggcagcagttcgttttccattgcccggtcgaggatactgtatttcgcctgaataatatccagttcaccatattgcagatactcgcggatatggtcagcatcgacgttagcagcgcctatagcgcgaattttcccttcagccttcaactcattaagcactgcgacagtttcagcgatcggcgtaaaaaatggcggcaccgactgccagtgcgtcatgtagatatcgatgtaatcaatacccagacgttgcaagctggcttctacctcttcgcggatagattccggggaaaggtttttatacaactgccgatcgccaactttgttgaataaacttccttttcgttcccagacaatgccgcatttggtttctactacaacctgttcacggggcagtttttttaacgcctgaccgacgataacttcactattgccaaagttatatcctggcgcagtatcaatcagattaatgccgcaacgatgggcttcaagaatcgtatcaatacatatttgccgatcgagatcgccattccatgcaggaccgccgccaatggcccatgtccccaaccccattcgcgaaagcgtaatatccgttgtgcctaaaggtatctttttcatttgccttcattatccttcgtattcttccagcaattgttcgaccagctttctgttttttacgccggtggtggcaccgacgcttagaaccgagatagccgccgttgcattggcaaagcgtgcgcattcacgcagatttttgccttctaacagtgccgcaataaaacctgaagcaaagttatcgcccgcgccaatggtgtcgatggcggttattcctgcgaccgccggcaccttcatcgttatgtcaccacgcttgataaagcagccgtctttacccgttttaatcaccaccgtttttacgccgcacgcaagaaagcagtcagcaatttcatccagtgtctctttcccggtgagtaattttgcctcggcaaaattaggaaacagataatcgacataactcaatgcttcgcaaatatcatccagcgtttcattcaaccgcggtttgatcatatcggcacagataatcatctgccgggctttagcttgcgtaaaaatttctgttagcgctttaccatccaatagtggactgttgaaaatactggccagtgataataatttcgcctgagaaaaccgcgcaaaatcaacatcgtcaatattcaatttccacagactgccattacggtttgtgacaaacgtccgctcgccatcctccgtcaccagtccaacgttaatagaggtatctatgctgacgtcctgcttcaggctttgaatatcaatattctctttgcggcaatggtcgagaataaattgccctgcggcatctttaccaatacgactcattaatgctgtgcgatggcccagacgagaaataattgttgcttcatttattgcatcacccccggtggtcattgcgattctttcaagaggataagaatccacatcaaagatatttttactgaccggttgcaatggaatatcaacaatagcggcacctatacaaataacgtcgagattatccatatcattattccgctttgccatcagaaccgaacagtttaattttttccaatgcccgttcttttacagctttacgtacttcacgttctaaattcaggaaaggctgatcctggttttctttcactgcaaccattgcggcctgacagagctccgtatgaatgttgattttcgcgatacccaacgaaattgcagttttaatgtcggcatcactgatccccgatgcaccgtgcaaaaccagcggaacagaaacggcatcgcgtacgcgtttgacgacctcaaagttcaattgtggctctgacgtataaaccccatgctggttgccgatggcgacagccaatgaatcacagcccgtacgttcaacaaattcagccgcctggtaaggatcggtatagtgatagcccgccagcgcttcctcataaacggtttcattaccgacatgccctaattccgcctctaccggaatacccagcggatggaagaaatcgacagcctctttggttaagcgaatattttcttcgaaatcaaatgcggaagcatcacgcattaatgaattcataccatgagtccaggcgttatgaataatctccatactccgaccatgatcccaatgagttattaccggcaccgttgctttttgtgccattgataccatcatgtgagagaaatcttcaaatgaggtgttcccgacaaaacctgtgccaaaagaaataataaccggtgatttcgcttcttcggctgcgtcgataacgcccatcaacatttctgcattccatacgttaaaatgggcaattgcataatgtttatttgtggcattgttttcccaatatctgatatctgcgagcatgttctgttctcccatattaattaatcgctaattttaataacgcctttaataatgtcgcgtttgttgttaaccgactcttcaaatgcctgttgtacatcctgataatcgtaaatatgcgtcaccatcgatttcacatcgaatcgccctgaagaaatagcttcaatcgtgaccggataacgattggcatagcggaataccgtctggatagtgacttcgcgatttattttgaggaaattgattgccgaatcgccgggtacagtaccaacaatcataattttaccgccgcgcattaccagataaggtgcctgtttaacggtgactgcagaacccgctgtttcgaaaacaatatctgcgcccatgtcttcggtaaattgctgacagcgtgcaatagtgtcttcttttgcgccgttaataaccactgtcgcaccaagctgttccgccattgccagacgtttttccagcacatcaacgacggcaatttccgttgctcccaggcatttgcacgcttgcaacgtcatcaaaccaatacaacctgctcccagaataattatcttcttacccggtttaacatctgccagcatcgcggcatgcatcccgactgcggcaggctccaccagcgccccttccatcgtgtccatattgtcgggcagtttgtaagtaaagctctccggatgacacagatagtgcgttaatgcgccgcggtagttgggttgtgtcgccataaaatcaacgtccgggcagatgttatatttgccttccagacagtaacgacagtgaccgcaaggaacgccaggttcgatatttacccgatcccccggtttaaatttgcgcacgcggcttcccacagccacaaccgtcccggcgcattcatgacccaggccaatttcttgatttgggtctttaggcggaataaacgggcctgattcaaaaccatgtacatctgaaccacaaataccgacatattctactttaatcaaaacttcatcttctttaggcacaggtatttctgctgaaataattttcattgtgcccggcacctgcaatattgcttttgaatttttcattttgaatccacccgtattatttattggctactgcatcaatacttaaactttcaacagagacacctttggtttcaattccaatggtggcgatagcaattgcgacaacaattgaaacagcccccagaagaataaagactcccgttacgccataactactgagcagcactgcaacggcataaggtgcggcaataccactgattcgccctaccgcattcgccagaccggagccacggagtttggcctctgtcggccagatttcagggacatacactgccgaggcatagcaaacgtacatatagacgaaagtaatcaggaagaaaccaatcaacgttatgagcaacatactggtttgcagtgaatagatatatccgagcaccgcaatcaggattaatagccccacacccattgttttacgcggaattttatccatcaccagcatggcaataaaaataccaaatggcgcgccaaacatactcatggtatttaaaacaatcgagtcttttaaattaatcccctgggtcatgaatattgttggcaaccagttaattagtgtgtactgcacaacgttcatggcaatcagcacacaagagcctaatatcacgcgtctcagtaatactcctgtcagtaaggctgaatacggcaccgcttgtggcgctttaccgtcatcagcaataaccacaggcggcaaaggtttacccgtctggcgtatgacgccttcttctatactccgcatgactttctcggcttcctgataccgtccgcgcgattccagccagcgcggggattcaggaaagtagcgccaggccagcgccgtagcgataagcgacaatattgcagggataagcagttgtacccgccagttccactctgcactaatcagcggcgtgagtcccatcgcaatcagtgaacagagcggatatgaccagttgccaataaaggaaacccgactggaccacgttccgcgatttctaccgggcatatattcggtgaaaccagcaaacagtgtaaccagtaaagctcccagcccaactcccatcacaaaacggcaggcaataaggaaatccatattcggtgagaaagcaccgacaaccatcgaggcaatatgaatggcctcatagaggatgaacgcatttctgcgaccggttttgtcgccaatgatgccgcccaccagcgcaccgagaaacattccggcggtcgtgattgctgagaatgtggctgtggtggaattatctgtccagcccaacgctttcagctgcgcgaggatcaagccaccaacggcattactccagcagacaagcaagccaaacgcgacgatggcaaacattgacgaatgccagcggcaatccggtaagcgatccagccgtgcaccacaatgcggttttgttatctgttccatgcgataacgttccttcaggagagtggttattcatcaaagtcgtaagtcatgatcactttgattgcggttttatcgaccatcgcatcaaacccttcgcgccattgcgacaggccgatacgatgcgtgatcatcggtttgactttgatagcgccgctggctaatagcctgatagcgttacgccatgaggtggagtcataggccatatgcccaatgatgcttttgttccaggcggtaatgtcattaatcgagaaatcaagaggtttgaagcccattccaacgcgtactacttccccattagggcggagcatttcgatggcttgtttcaatgcgatattggcaccggagcattcaatcaccagtcccagattgtctttgccacaaatttgctggcagcgcgccaccacatcttcggtagaaccatttactactgccgtcgcacccagttcttttgcaaccgggaagcggaccgccacatcttcttgcagaccaacgacgacgatatttaccgcccccataattcgcgccatttgtacggagaacagcccgagtgggccagtgccgatgacgaccacatcctgaccaggaaggaatttcgattgctgcgcgatggatttgtaggcattacagatagggtcaagtacggctgcgtcctcataatcaacaccatcagggatttcccacaacgcatgacgatgaattttgagaatttcaccaggaacaagacaatatttggaaaaaccaccgccccaggtattgttatccagaccaaggtttactttttctgtacaacacagaaaatcaccttgttcacaggccgggcaaacaccgcaaacgtgaccgctgttatccgacacgacgcgttgccccactttccagtctttgactttttcaccaacctgcgcaatacaacctgcgaactcatggccgcggatagagttaaactcatcagaaccgctatcgacattgtagtgcttcatgtctgcgccgcagattgccgcggctttaatttcaatcactacgtcttccgggccacaaatgggttgtgggacatcaatcatcttgtagccgccaaaggccttgccaaaccgagccagtgctttcattgcgtcatcctctgtgttttgttttgcttagatggccatcatacttacccacatgatttttgaggtcaacattaaatctgcaaaacacagataatgatctgcgttttacaacttagatcacaattacgcagaaaatggctgggtctgttacaggttggtggaaggcggaacgcaaaaagagcaaattcgagagggattaccggccaaataggtctgagacttaagttcaggagaagtcattcaggcgtgaacgcgacggcaagagatcggactgggacttagccaggtcatggcgagataattgagatgagtcgtggggtcattgttggctatcccctttataaccgcggcaaaaaggggataaaccacttacttaaacatggcaataggctttgctgagataccaaaatcttcttttaactgctgtttgctcttcatgaccatctgaccatttgtgtcaattgtcatatgctgtgcttcggtattatggcgggcttgccacagcatcaccagttgcaggcagttctctttttgttcctcggtcaacgcaacgccatcgggccatttccccagttcaacggcggtcgacaaacgctggtatacctcaggcgtcatgctgttgataatgtcatcaagattcataatttttccgctcctgtggaataagttgctgaatcgttttttcaaccgttgatttcttcgccgttttcgccatcggtaaagcgtaaagaggcagagttaacacaataacgttcgcccgttggctgcggcccgtcagggaagacatgccccagatgggcatcacagttaccgcaacgaatttctatgcgctgcattccatgtgacaagtctttgatataacgaatggattcttcactcaccggttcgtagaaactgggccagccacagccggaatcatacttggtttcggaatgaaacagcggggcatcgcagatcaaacagtgatatacgccgtcacgcttgttatgcagtaaacgacccgtaaatggcggttctgtcccatgattctgcgtcacgtaaaactgcatctcggacaaattttttttcagttcttctgccgaaggtttattagccatttgctcacatctcactttaatcgtgctcacattacgtgactgattctaacaaaacattaacaccaactggcaaaattttgtcctaaacttgatctcgacgaaatggctgcacctaaatcgtgatgaaaatcacatttttatcgtaattgccctttaaaattcggggcgccgaccccatgtggtttcaagcccaaaggaagagtgaggcgagtcagtcgcgtaatgcttaggcacaggattgatttgtcgcaatgattgacacgattccgcttgacgctgcgtaaggtttttgtaattttacaggcaaccttttattcactaacaaatagctggtggaatatatgactatcaaagtaggtatcaacggttttggccgtatcggtcgcattgttttccgtgctgctcagaaacgttctgacatcgagatcgttgcaatcaacgacctgttagacgctgattacatggcatacatgctgaaatatgactccactcacggccgtttcgacggtaccgttgaagtgaaagacggtcatctgatcgttaacggtaaaaaaatccgtgttaccgctgaacgtgatccggctaacctgaaatgggacgaagttggtgttgacgttgtcgctgaagcaactggtctgttcctgactgacgaaactgctcgtaaacacatcaccgctggtgcgaagaaagtggttatgactggtccgtctaaagacaacactccgatgttcgttaaaggcgctaacttcgacaaatatgctggccaggacatcgtttccaacgcttcctgcaccaccaactgcctggctccgctggctaaagttatcaacgataacttcggcatcatcgaaggtctgatgaccaccgttcacgctactaccgctactcagaaaaccgttgatggcccgtctcacaaagactggcgcggcggccgcggcgcttcccagaacatcatcccgtcctctaccggtgctgctaaagctgtaggtaaagtactgccagaactgaatggcaaactgactggtatggcgttccgcgttccgaccccgaacgtatctgtagttgacctgaccgttcgtctggaaaaagctgcaacttacgagcagatcaaagctgccgttaaagctgctgctgaaggcgaaatgaaaggcgttctgggctacaccgaagatgacgtagtatctaccgatttcaacggcgaagtttgcacttccgtgttcgatgctaaagctggtatcgctctgaacgacaacttcgtgaaactggtatcctggtacgacaacgaaaccggttactccaacaaagttctggacctgatcgctcacatctccaaataagttgagatgacactgtgatctaaaaagagcgacttcggtcgctcttttttttacctgataaaatgaagttaaaggactgcgtcatgattaagaaaatttttgcccttccggtcatcgaacaaatctcccctgtcctctcccgtcgtaaactggatgaactggacctcattgtggtcgatcatccccaggtaaaagcctcttttgcattacagggcgcacaccttctctcgtggaaacctgcgggtgaagaagaagttctgtggttgagcaacaacacaccgttcaaaaatggcatcgctattcgcggtggcgtaccggtttgctggccgtggtttggtccggcggcacaacaaggcctgcctgcgcacggttttgcccgcaacctgccgtggacgctgaaatcacatcgtgaagatgctaatggcgtagcgctgacttttgaattgacacaaagcgaagagacgaaaaaattctggccgcacgactttactctgttagcgcatttccgcgtgggtaaaacctgtgaaatcgatcttgaagcacacggcgaatttgaaaccacctctgccctgcatacctactttaacgtgggtgatatcgctaaggtaagcgtcagtgggctgggcgatcgcttcattgataaagtaaatgacgcgaaagaagatgtactgaccgacggtattcagaccttccctgaccgtaccgatcgcgtgtatctgaatccgcaagattgcagcgtgattaatgatgaagcgctgaatcgtattatcgccgtaggccaccagcatcatctgaacgttgtaggctggaacccgggaccggcgctttcagttagcatgggcgacatgccggacgatggctacaagacctttgtttgtgtagaaacagcttacgcctcagaaatgcaaaaagtgaccaaagaaaaacctgcacatctggcgcaatccattcgcgttgcgaaacgttaatttacgttaatgttgtgtgccgggtgcgatgcatccggcacacaacatcacaccatatccagcgcagtttttccttttggtgccggatatgccttatccagcatagctaattccgctgaagaaagttcgacctcaagcacagccgcattttgttggacatgggcaatcgtggccgcttttggaatcgccatcacaccctgatgactgatcacccacgccaacaatacttgtgccgcgctgatattgtgagcatgtgcaatttcgttgactaccgcgttttttaacagtccattgcgcaaccgcccggcctgggctaacggactgtaagccatcaccggcatctgctgttgctggcaccaggggagtagatcgtactcaattcctcgtgaaccgagatggtaaagcacctgattagtggcacactgatttccccccggcagctgccagagttcctgcatatcagcataatcaaggttagaaacgccccagcggcggatttttccctgggcgatcaatttttccatcgctgcgacagtctcttcaaaagcgaaactgccagaccagtgtaataagtaaagatcgagataatcagtattgagacggcgtaaactggcttcgcatgcatttatcgctttttgcccgccagcattccacggatagactttagagacgagaaagaccttctctcgcagaccggttaatgcttccccaaccaccttttcggcaccgccatcggcatacatttcggcggtatcaatgagggttaaaccgagttcaatgcccgcgcgtagtgcagcaacttctgttttgcgctgactggcatcttcgctcatataccatgttccctgccctacggctggcagtgagacatcgccactaaattgaatcattttttgttgcattgtttcctcccaggtattgcaccaccgtaatgcaaaacagggcgtgacgccctgtttttatgcacaaaatgccctggaaagatgcattatcagaatttgtaggtgatcccggtagaaatcaggccagtccaggatttatccaccatcgggctgtcagtaacttcatcagacagacgggtgtagcgtgcggtaccgtaaacactccagtcgccgaggaagttgtagctggcgctcagctccaggtaagggctccagctgtcgttcgggttatagccacgcagaccgctgcgagcggactctttgcgcgatacgccataatagtattcgttctggttttcgctgttccactgcacaccaatacccggagtcacggtcaggccaccgttggtgtaacgatacaaccaggccatatcccagacgatgccgttgctgttatccagggtatcgccagccagggtggtacgcaggtaaccgtactgggtaaagtgagcataagacagaccagccatcatggtgctcttacggtcatccaggtgacgcatttggtgatcgccactgtctttcgctttgaagtaaagcggcgaccagtaagcggtaattgaaagtttatccgttgcgtcattccacaggtagtaaccaccacctaagccacggaaccagaagttatcgccttcatagttgattaccggtactgggtaaacatcggtatcgtaatctttatatgggtgttcaacgacacctacgcctgcgcccagggaaaatttaccttcagcgtgcgctacgcctgcagacgttgcgataagcactccaagtgccagaagtttgagtttggtcacaattaatcattccttaaacaaatgtttagcgggcgacaaagtttacccgtcaatacatcgaaacccaacctttttacgttttcattttttaaagtaactgtttaattttcctgacgcggatgacaccgcgcttacagccaaatgaatttagcgttactggcgagcctggtctttacattaattatgcaaaatttatggatgagttgttgatatgccattgaaattaagaaagccgtgcaggcaagttttccatttgccatctacgcttaattttgaaggtgtatcaccgggcacgttgttctcatcgtcgataaaatggcatgagagttgctgtgttttagcaagagacgtcgttcagtttacctcttccgggagcctctactattcatatgaacggctcttaacctgtgctaaaaaacgaaaggacggcataccatgaatatattcgatcactatcgccagcgatatgaagctgccaaggacgaagagttcacactgcaggagtttcttaccacttgtcggcaagatcgcagtgcttatgccaacgcggctgagcggctattgatggctatcggtgagcctgtcatggtcgatacagcccaggaacccagactttctcgactcttttctaaccgggtcattgcacgttatccggcgtttgaagagttttacggcatggaagacgcgattgaacagattgtctcttatctgaaacacgcggctcaggggctggaagagaagaaacaaatcctgtatctgctggggcctgtgggtgggggtaaatcatcgcttgctgagcgactgaaatcattaatgcagctcgtaccgatttatgtattgagcgcgaacggtgagcgtagcccggtcaacgatcatccgttctgtcttttcaatccgcaggaagatgcgcagattctggaaaaagagtatggcattcctcgccgttatctcggcaccatcatgtcgccgtgggcggcaaaacgcctgcatgaatttggtggcgatatcactaagttccgggtagtgaaggtctggccgtcaattctgcaacaaattgctatcgccaaaacggaacccggcgatgagaacaaccaggacatctccgcgctggttgggaaagtcgatattcgtaaactcgaacactacgcgcagaatgacccggacgcctacggctattccggtgcgctgtgccgcgccaatcaggggatcatggaattcgttgagatgtttaaagcaccgattaaagtgctgcatcccttgttaaccgccactcaggaaggtaactacaacgggacggaaggtatctccgccctgccgttcaacgggattattctcgcacactcgaacgaatccgaatgggtcactttccgtaataacaaaaacaacgaagccttcctcgaccgtgtttacatcgtgaaggtgccgtattgcttacgcatttccgaagagatcaaaatctacgagaaattgcttaatcacagtgaattgactcacgccccctgcgcccctggcacgctggaaacgctgtcacgtttttccattctttcgcgccttaaagagccagaaaactccagcatttattcaaagatgcgggtttatgatggcgaaagtctgaaagacaccgatcccaaagccaagtcgtatcaggaatatcgtgactacgccggtgtcgatgaagggatgaacggtctgtcgacgcgttttgcgtttaagatcctctcccgcgtgttcaacttcgatcatgtagaagtggcggcaaacccggtccatctgttctacgtcctggaacagcagatcgagcgcgagcagttcccacaagagcaggcagaacgctatctggagttcctgaaaggttatctgatcccgaaatatgccgagtttatcggcaaagagatccagacggcctaccttgaatcctattccgaatatgggcaaaacattttcgaccgttatgttacctacgcggatttctggattcaggatcaggagtatcgcgatccggataccgggcagctgtttgaccgcgagtctcttaacgccgagctggagaaaatcgagaaaccggcggggatcagtaatccaaaagatttccgcaacgagattgttaacttcgtactgcgcgccagagcgaataacagcggacgcaatccgaactggaccagctatgaaaaactgcgcacggtcatcgagaagaaaatgttctccaataccgaggagctgttgccggttatctcgtttaacgccaaaacgtcaaccgacgagcagaagaaacacgacgactttgtcgaccgtatgatggaaaaaggctacacccgtaaacaggtgcgtttactgtgcgaatggtatttgcgcgtacgtaaatcgtcttaacaaccctggcccggtacacatgttaccgggcctacaacgacagcgaaccgtgggcctgagaagcggcaacacaggcgtagcatacagttggcaaatgtagtacggggggcatatgacctggtttattgaccggcgtctgaacggcaaaaacaaaagcatggtgaatcgccagcgttttttacgccgttataaagcgcaaattaaacagtcgatctccgaggccattaataagcgttcggtgactgacgtcgacagcggcgaatccgtatccattcccacggaagatattagcgaaccgatgtttcatcaggggcgtggcggtctgcgccaccgcgtgcatccgggcaatgaccatttcgtccagaacgaccgaattgaacgtccccagggtggcggcggaggttccggcagtggtcagggccaggccagccaggatggtgaaggtcaggatgaatttgtctttcagatttcgaaagatgagtatcttgatctgctctttgaagatttggccttaccgaatctgaaacaaaaccaacaacgccagctgaccgaatataaaacgcatcgggcgggttataccgctaacggcgttccggccaatatcagcgttgtgcgttcattgcagaactcactggcgcgacgcacagccatgacggcaggcaagcggcgggaacttcatgcactggaagagaatttggccatcatcagcaacagtgaacctgcgcaactgctggaagaggaacgtctgcgcaaagaaattgcagaattacgtgccaaaattgaacgcgtcccttttattgacaccttcgatttacgttacaagaactacgagaagcagcccgatccctccagccaggcagtgatgttttgcctgatggacgtttccggttcaatggatcaatccactaaagatatggctaagcgtttttatattctgctgtatctgttcctcagcagaacgtataagaacgtggaagtcgtatacatccgccatcatacccaggcgaaagaagtcgatgaacatgagtttttctactcgcaggaaacaggcggcaccattgtttccagcgccctgaaactgatggatgaggtagtgaaagagcgttataacccggcacagtggaatatttacgctgcacaagcatcggacggcgataactgggccgatgactctccgctttgccatgaaatcctggcgaaaaaattattacctgttgttcgttattacagctatatcgaaattacccgtcgtgcacatcagacattgtggcgagaatatgagcatctgcaatctactttcgacaactttgcgatgcagcacatccgcgaccaggatgatatttatccggtgttccgtgaactgtttcataaacaaaatgcaacagctaaaggctaaaactatcagccaggtcattatcgcctggctgatttttagcttactgtaaattatctcatttattacatacattagcttacaatcgctttaaatatgacagcataacctttacataatttagttccagaaaacaatcattcggaaaaatgattcagtcaacacgtatttccatggggttattctttaaatattttttatcgttaacgaaaattgatcctggtcaaaactatatatctctgccatcaataaaatccagcactcacattgctctcctttttatggtttctatgggtacacaaaaattaaaagctcaaagcttttttattttcagtttattgctgacgttaattttattttgcattactaccttatataacgaaaacacaaatgtaaaactcatcccacagatgaattacctgatggttgttgtggctttgtttttccttaacgccgtcatttttcttttcatgttaatgaaatatttcactaacaaacaaattttaccaacactcattttaagccttgcatttttaagtggccttatctatttagttgaaaccattgtaattatccataaaccaattaacggcagtacactgatccagacaaagtcgaatgatgtttctattttctatattttccgccaactcagttttatttgtttaacctcgctggcgctcttttgttatggaaaagacaacatccttgacaacaataagaaaaaaacgggaatcctgttgctggcgctgatcccttttttagtttttccccttctggcacacaatctgagcagttataacgctgactattctttgtatgtcgtcgattactgtccggacaaccatactgcgacctggggaatcaactatacaaaaatattggtttgtctgtgggcatttttactgttctttattatcatgcgcacacgattagccagcgaactatggccgttaatagcattattatgtctggcatcgctatgctgcaacttacttctactgactctggatgagtataattatactatctggtatatcagtcgcgggattgaagtttccagtaaactgtttgttgtgtcttttctgatttataacatttttcaggagctgcaactctccagcaaactggcagttcatgatgtgctgaccaatatttataatcggcgctactttttcaacagcgtagagtcattattgtcgcgacctgttgttaaggacttctgtgtcatgctggttgatattaatcagttcaaacgcatcaatgcccaatggggacatcgtgtgggtgataaagtgctggtttcaattgtcgatattatccagcaaagcatccgccccgatgatattttagcgcgactggagggtgaggtgtttggcttgctatttaccgaactcaatagtgcccaggcaaaaatcattgcggaacgtatgcgtaaaaatgtcgaactcctgaccggctttagtaacagatatgatgttcctgaacaaatgaccatcagtattggcacggttttttcaacgggtgacacgcgtaatatctcgcttgtcatgacggaagcagataaagccttacgcgaagcgaaaagcgaggggggcaacaaagtgattattcatcatatttaagtgcaaaaatattcagagccatgctttttgcgtggcttttgcatacaatttattactattacccctaaatttcccctccccagcggcgcagagatgagtataattagcgcccctgtgccaggccgcaatcgaactttatctggttttctcgtttcactaaccgaaggagtgccatttatcatgaaattgcaccatagaatgctccggcattttatcgccgcaagtgtcattgtgctgacatcttccttccttatttttgaacttgtcgccagcgacagagcaatgagtgcctatctgcgctatatcgtgcagaaagcagactcctcctttctttatgataagtatcagaatcagagtattgccgcgcatgtgatgcgcgctctcgctgctgagcagtcggaagtgtcgccagaacagcggcgcgccatctgcgaggcttttgagtctgccaataacccccatggcttaaacctgactgcccataaatacccgggcttacgtggcacactacaaaccgcatccactgactgcgacacaattgtggaagctgcagcactattacccgcttttgatcaggcagtggaaggcaaccgccaccaggatgattacggttcaggtcttgggatggccgaagagaaatttcactattatctcgatctcaatgaccgctatgtctatttttatgagccggttaatgttgaatactttgcgatgaataactggtccttcctgcagtcaggaagtattggcatcgatcgcaaagatattgaaaaggtatttaccgggcgtaccgtattgtcgagcatttaccaggatcagcgtactaaacagaacgtgatgagtttgctgacgccggtatatgtcgcagggcagctaaaagggattgtgctgctggatattaacaaaaacaatctgcggaatatcttttatactcatgaccgccctctcctctggcgttttctcaatgtcacgctaaccgataccgattcggggcgcgacattatcatcaaccagagcgaagataatctgttccagtatgtcagttacgtccatgacttaccgggcggcattcgtgtctcgttatccattgatattctttactttatcacgtcttcgtggaaaagcgttctgttctggattttgacggcgttaattttgctgaatatggtgcggatgcacttccgtttataccaaaatgtgtcgcgagaaaatattagtgatgcgatgactggactgtataatcgcaaaattttaacccctgaactggagcagcggttgcagaaactggtgcaatccggttcttcggtgatgtttattgctattgacatggacaagttaaagcaaataaatgacaccctcggtcatcaggagggggatttagcgattacgttattagctcaggcgattaaacagtcgattcgtaaaagtgattatgccatccgactcggtggcgatgaattctgcatcattcttgtcgattcgacgccgcaaattgcagcacaactgcctgaacgtatcgaaaaacgtctgcaacatatcgcgccgcagaaagagatcggcttctcttccggtatttacgcgatgaaagaaaacgatacgttacatgatgcgtataaagcttccgatgagcgtttatatgtcaataagcagaacaaaaacagccgttcatgataaccttctgtggttgtttgcttgtaatctcaggagcgtgaaatgactgaaatggctaaaggaagcgtgacgcatcagcggttaatcgctttattatcacaagaaggtgctgacttccgcgtcgttacccatgaagcggtaggtaaatgtgaagcggtgtcagaaattcgtggcaccgctctaggccagggtgctaaggcactggtatgtaaagtcaaaggcaatggcgtaaatcaacatgttctggcgatcctcgcagccgatcaacaggccgatctgagccaactcgccagccatataggcggattacgcgcttcgttggccagcccggcggaagtcgatgaactcacaggctgtgtcttcggcgcgatcccccctttcagcttccatccaaaactcaaactggttgccgaccctctactcttcgaacgatttgatgaaatcgccttcaatgcaggcatgctggataaatccgttattttgaaaaccgcggattatttgcgcattgcgcaaccagaactggtcaatttccgccgcactgcgtaactagccggtccgttcgataagaagaacggacaaaaccagtacaacagcaatggcaaaaaacgatgacgtgataatcagtgtctcgacaaacatttgatcgttcatagcatgcccccgggagatagctgttttcacgttattgttagcgtgcacaaatggcagtttgatgacagttcgcctgattttttatgcaaaaaacgtaaagattttctacttccttcctgcagcaagcgtaaagtaagcaggcttattattttttggcaaggaaaccacgatgtttgatgtcactttgctgatcctgctcgggttagctgcgctgggctttatcagtcataacaccactgtcgccgtttcaattctggtgttaatcattgtccgcgtcacaccgttaagcaccttttttccgtggattgaaaaacaggggctaagtatcgggataatcattctgacgattggcgttatggcccccatcgccagcgggacgctaccgccctcaaccttgattcactcgtttctgaactggaaatcactggtggcgattgcagtaggcgtgattgtctcctggctgggtgggcgcggcgtgacgttaatgggcagccagccgcaactggtcgccgggctgctggtaggcactgttttaggcgtagcgctgtttcgcggcgtaccggttgggccgcttattgccgcgggtctggtttcgctgattgtggggaaacagtagttaatctcgcaatatatcggcctggcgtttgccccaggcctttcttaaacatagtaataaaggccgttgttgaatcataccccagcgtatgagcaactttctgtacagtatcgcctttcactaatccctgaagcgccataatcagctgtaactgctgacgccactggcgaaaactcaaccccgtctcttttactatcagtcgggcaagattgcgttcactcatcgcaaaaaagccagcccattgccccaatgccccccactcgacaggccctttcgccatcatctccaccatcgtgcggattttaggatgagaagaaacgggcaggtgcagctgttgttgtggctgctgagggagttcatcaaacaggacctgaattaatctgcgggtcattggctcagcacgctgagtcgtcgtcctgtttgccagggttaaaattaattcccggcataagggcgatattttcaatgtgcaacatgttgtcggcattgtcactgcgctgggttcgataaacagaaaacagagttcagcattagctgttacttgattgctatgttccaccccgcccggtatccaaaccgcatattgtggcggcaccatccacaaagcattttccaccgtacaggtaattgcaccatgtagcgccagtatcagctgtcctttgcggtgctgatgtacaggactggttaactcatccgttccggcgtgaatacaaaatgcgaccgcggcttcatggtgtcggtcgggttcatagccattgagattcaacctgtgcatcattttgtccgaacttagcgataatttgtcattttagcttgattcaacataacaataaaaacggtaaggtacagcctcgtttgtaacaatgagaagcatatgacctgttcaacttcattaagcggcaaaaacaggattgtccttatcgctggcattctgatgattgccacaacattacgcgtcacctttaccggcgcagcaccgttactggatacgattcgttccgcttactcgctgacgacagcgcaaaccggcttattgaccaccctgccattattggcctttgcgctaatctcacctttggctgccccggtagcgcgacgttttggtatggaacgtagcctgtttgccgcgttacttttgatctgtgctggtatcgcaattcgctctctcccttcgccttacttattatttggcggtacagcggtcattggcggtgggattgcattaggcaatgtcttactgccaggattaattaaacgcgatttccctcattccgtcgccagacttaccggcgcatattccctgacaatgggagctgcagcggcactgggatcggctatggtcgtgccgctggctttgaacggttttggctggcaaggcgcgttgctcatgctgatgtgttttcctctgctggctctttttttatggctgccacagtggcgaagtcaacaacatgcaaatttgagtacctcgcgcgccttacatactcggggtatctggcgttcgccgcttgcctggcaggtcacattgtttcttgggatcaactcactggtctattacgtgattattggctggcttccggcgatcctcatcagtcacggctatagcgaagcacaggcgggttcactgcatggtttgctgcaactagccacagcagcacccggtttgctgatcccacttttcttacatcatgtgaaagatcagcgtggtattgcagcgttcgttgccttgatgtgcgcagtgggcgcggttgggctctgctttatgccagcgcacgcgatcacctggactctgcttttcggttttggttccggcgcaacaatgatactggggttgacgttcattggtctgcgggctagttctgcgcatcaggcggcggcactctcggggatggcacaatccgtcgggtatttgttggcagcctgtgggccgccgctgatgggtaaaatacacgatgctaacggtaactggtctgtaccacttatgggtgttgccatactttcactactgatggcgattttcggactttgcgccgggagagacaaagaaattcgctaatatccggtgctatagtgacgtaacaaatcatgcgtgaaagggagaacaaacacgatgaatattcagtgcaaacgcgtttatgatccggctgaacagagcgatggttatcgcatactggtcgaccgcctctggccgcgcggtatcaaaaaaaccgatttagcccttgatgagtgggataaagaaatcacgccgtcaacggaactgcgcaaagcctttcacggcgaagtcgtcgattatgcaacctttcgcgagcaatatcttgcagaactggcgcaacacgagcaagaaggaaagcggctggcggacatcgccaaaaaacagccgctgaccctgctctactcagcaaaaaacaccacgcagaaccatgcgctggtgctggccgactggctacgtagcttgtgattttagtacagcatccggcggttatttttcaccagccggatggtcacgccgccacaatgcccattcatcaatcgtttcaccgcccggtaatttgcaattgttgctgaccccttgcgctgtctgcactggaatgagcgtcccgcccttctgctggcaatagaccgacgccggatttgccataccaatctgcggcggtttaggtgcttctggctgagaaggggttgaacaaccagccaggaccagcaagcaaggcagaacaaaactgataattttcatttattgatctcacatatttatccaagattagagtatcgcggtatcgttttgttttgcagcactatttttattacattcactcaaaacatattacgtcttgtttcatctttgttgatgatgttttatcatgcctgcaaagattaaataatcagcatttaccctccgtatcctggagttgttccgtgtcagatcagattatcgcccgcgtctcgcaatcccttgccaaagaacagtcactggaaagtctggtccgacagcttctagagatgctggaaatggtcactgatatggaatcaacctacctgaccaaagtggatgtcgaagcgcgcctgcagcatattatgtttgcccgtaacagccagaaaatgtacatcccggagaattttaccgtctcgtgggattactcgttatgcaaacgcgccattgatgaaaactgctttttcagcgatgaagtccccgaccgttggggtgactgtattgcggcacgcaatcttggcatcaccacatttctgagcacgccaattcacttaccggatggatcattctatggcacgctttgcgccgccagcagtgagaagcgccagtggagtgaacgcgcggaacaggttttacagttattcgccggactgattgcacaatatattcaaaaagaggcactggttgaacagctgcgcgaagccaatgctgcgctgattgcgcaatcgtataccgactcgttaaccgggctaccgaatcggcgggcgatttttgaaaatctgacgacactgttttccctcgcccggcatcttaaccataagataatgatcgcgtttatcgatctggataacttcaaattaatcaatgatcgttttggtcataatagtggcgatctgtttctcattcaggttggcgagcgccttaatacgctccagcaaaatggcgaagttattggtcgtctcggcggtgatgagtttttagttgtttcactaaacaacgagaatgcggatatttcgtcgctgcgagaacgcattcagcagcaaatacgtggagaatatcacttaggtgatgttgatttgtattatcccggtgccagtcttggcatagtagaagtcgatcctgaaacaaccgatgcagacagtgccctgcatgctgccgatattgcgatgtatcaggagaaaaaacacaaacagaaaacaccttttgtcgcgcatccagcgctacattcctgaggcgtattcacatccttttgattggtgataacatgcgaatcggtattatttttccggttgtaatcttcattacagcggtcgtatttttagcatggttttttattggcggctatgctgccccgggagcataaagatgaaaaaaacaacgattattatgatgggtgtggcgattattgtcgtactcggcactgagctgggatggtggtaacgtcacctctaaaaaatagcaaaggctgcctgtgtgcagcctttgtgcaatttaagcgttaacttttaatcttcctgtagataaatagcacgacaatcgcaccaataacggcaaccacgaagctgccaaaattgaagccatcgactttaccaaagccaaacagcgtgctgatccatccgccgactacggcaccgactatccccagcaggatagtcataaagaatccacctccatctttacctggcatgatccacttcgccagaataccggcaataagcccaaaaataatccatgacagaatgcccattgtttcctcacttatctgttttgcattagcgggttagtcgctgataaaaagcatagcacaacatcgggagggcaagatttgtgacgagcatcacggaggttttttttgcgatggcgcagaaattgcgccatcaacgatcagtgataattaccaaccacaaacatcatgttcgttttccgtgtcataagaacgtacggtattcaccagatcttttatcacttcagccgccacttctggcaccagcaaagtcatcggcgtctctgtttcataatcgacagaaacgccattgctgttattggtgacggtcacggtatacgttgctttgcccatgattcatttcccgttatgaatgactttccgttgttgcgcaccttccatcaggacttcaggagccacgaagaagtcaatgttgaaataagtatcgtcagtcatggcttcaatgttgtgccacttttctggagggaacaccgcaaactgccccgcttcgataaggatcacctgatcaggctctgcactgtgttcatcagcgtagccgagatatttgaccgccccatgcataacggaaaggcgtgggtaaaccccataagcgctaacttaagggttgaaccatctgaagaatgcgacgcctcggtgcctcgttaagacgatgcctcgcgttcttcaattgcgttttgtaggctgtcagggatactgtcccacgaatggccacctgtaagctccagatgaccattttttgttattctccacaacgagttagttcttcttttcggatccggcacttctggggggggaaatccagcgatggctggattatgtcgtcaattaaaaatgcggcgagtagattagcaaatatccacgctttcgcgagttcaggttcctttgcacgcaaagcatccaggtgcagcaaacttttgagccgcttaaaacgccagttcaatttgccatcgcagacggtaacaatcagccacttgctctgctgaatattcatcttccggtaatgatgttagcaatagcacatggcccgctgcttccagcgtttccgcctgaactactcgtccttttcgacgattctcgctgagcagtcgggttttactgattaatgctttttcgggaggaagtgatacggcaatgagacgtgccggaaagggagctccggcttttttattacctgaattgcctatcattacagtggtttcaccgttcttaccgcaatccagcccgcgcagaaaacccatcatgtcaaagcgcattccttctgcagttaaccagcgcaatcctcgccagtgaacccggacgatataatcagcttctccaaaagcaagtgagcggatacattcgggacgcgaaccgaatccccggtcagcaatgcgtatctcgtctgccgtttgcgcaaatcggtccagccgttcagcgtctctgctgtcggttagctcaaaatcagtgaactgacaggtatgaggatcatatcccatatgtagtcgccattcagcgctgccgcccccgggcgcactgattgctgttccatcgacaagacgcaatctctttccgcttgtacaacccgtaactgcggcgcgtacagcaagtgtttgtgcggcaagtatcgccaaaccagtcggcggcattccgcagccgcttcaggagagccacgtcagataatgttgcaacgtcatggagctgagcccatgcagtgacttcacgtaatgacatccccccggggccgtaagccagccccagacgtagcagagttgcagcatcacgaatttcgcggcggcgggttagagccccggcattacgtgccgaagtatccagttcttcgggcttaccaatatgggccagaattgctgaccagttatcgtgagagtaattcatcggcacgttaaatcatatcaggcgtaataccacaacccttaagttagcgcttatggggtaaacccccgggcgcgttcctttatcaagatgacgttcgaatattccggcaggtgcagtttgtttattccagaaaggcgttgagcgcgtatgaatataattctgtgggatttgaagcatccttttccctccttcggtgaatgcgctgaaaacggtttattccagccgtttcagggtacgcctgataatttgcattttaaataccatttattggttactttttagcaccatatcagcgaagaatcagggaggattatagatgggaagcccgcgacaacgcgggctgaaagcatcaggattgcagcgtcgccagtcgggcagcgaaacccacgaacatcaaaccaatcagtgagttgccaactttagccagtttctttttggtacgtatgtactgcgtgacaaaagcaccagatataatcaggaagctcaaatagcagaaactcaccagttccagcgtcgccgccagaataaagaatgaaattcccgtatgtggggcattaacatcgataaactgtacgaaaaacgacacatagaacaaaatggctttcggattagtcaggctcaaaattaacgcgcgtttaaaaatagcaccgtattggggctcatcggatttggcctcgctatttttacccttcagggtcgcgtaaagaattttactccccagatagagcaaataaaacgcaccaagataacgtacaatgatgaataatatcggggtggtcttaattaatgtcgccactccagcccatgccagaaacatcaataccgcatcgccaataaatacaccgcaggccgcaagataaccgcctttcataccgctactgacgctatttttgagtacaaacagggtatttggccctggcaccaacacaataaaaatggccccaaccagataggtccagtaattcagaaccccgtattcagcgaacacattaacctctttaattatctttcgatcatgcgcgattaaaggtgaatatgctaaccaatctgtagcggcttagaaaggagaaaatcaggttttaacctgatatcaacccgataattgaatcattaatcaggcatgctccagtgaaaaattcgggtagtgctcggcaaaatactggcgtaaaaattctaccgttatccgcactttcgctgacgtcgccagccttgaaacataaacggcccagacgttcgctggctggtaatattccggtagcacttgcactaaatgaccactggcaatgttttcgctaacatcccaccaggaacgcagagcaatcccctgcccatcgagacaccactgatggacaatttctccatgattagacgacagtgggccggtgactttaatcgcatgggggccttctttattgcgtaattgccagacaccaaaaggatgatcgcgctctttaatgaccaggcacggcaatgcagaaagatcggttaaatgtttcggcgcgccatgttgcgcaataaattccggcgacgcgcagagaatacggtaattggtcgccagtttgcgggcgattaaattaggggcgatgtcatcgccaatgcgaatatcgagatcgacaccttcattgaccaaatcgaccagtcggtcttccacatcaaaacgtaattccagttgcggatacgccttcgccagcgctgataacgccggagccaccacctgtcgtccaaaaccaaagctgctgataatacgcagcatcccctgcggcacctgacgcacgtcagaaagttcgtccatcatctgaccgacatcctgcaaaatccgctgcgcccattcataaatccgctctccttcttcggtaatggtgacgcggcgggtggtgcggtgtaacaacaccacgtttagcgtttgctccagcaaggcgatgcgcttgctgacgaacgccggtgaaacgcccagttcttccgccacggcggcaaaaccagcccggcgagccaccagcataaagacgcgcaaatcattcagcagcggtaaattattcatgattcgtgttttatgtttcaccagttacggggattaattccttttcagtcaattataggatggtgatgttgtcaattttgatggtcaggaagtgagaacccaatgatgaaaacgatgcgtattgctgcgatcccgggagacgggattggcaaagaagtccttcctgaagggattcgcgtgttacaggctgccgctgagcgctggggcttcgccttgagttttgagcaaatggagtgggcgagctgcgagtattacagccatcacggtaaaatgatgccggacgactggcatgagcaacttagccgtttcgacgccatctattttggtgccgtcggctggccggataccgttccggaccatatttcgttgtggggttcgctgctgaaatttcgtcgtgaattcgaccagtacgtcaacctgcgcccggttcgtctctttcctggcgttccctgcccgctggcgggaaaacagcctggcgacatcgatttttacgtggtcagggaaaacaccgaaggcgaatattcctcgctcggcggtagagtgaatgaaggtacagagcatgaagtcgtcattcaggaatcggtatttacgcgtcgtggtgtcgatcgcattttgcgttatgccttcgaacttgcgcaaagccgcccacgtaagacgctaacttctgccactaaatcgaacggtttagccatcagcatgccgtactgggatgagcgagtggaagcaatggccgagaattacccggagatccgctgggacaagcagcatattgatattctctgcgcgcgttttgtgatgcagccggaacgcttcgatgtggtggtggcgtccaatttgtttggcgatatcctttccgatcttggcccggcctgcaccggcaccattggcattgccccatccgccaacctgaatccggaacgcactttcccgtcgctcttcgagcctgtccacggttccgcgccggatatctacgggaaaaatattgctaaccctatcgccacgatttgggccggggcaatgatgctcgattttctcggcaatggcgatgagcgtttccagcaagcgcataacggtattctggcagcaattgaagaagtgattgctcacgggccgaaaacacctgatatgaaaggcaatgccaccacgccacaggttgccgacgcgatttgcaaaattattttgcgttaaggtcaaaccagtttatttgaaccgcgtcactgacgcggtttttttattcgttctttgcagtaaataacctgcgtcatttcaccttttattgtttccgtttcgtgttttatggctttccgtattcttaattgtttaatttatgtaacatacaaataatcaatttgttaaacacaacatacaactcattaccctgcaaataattacaactggcaaaagccagagacgggcttttatgcccaggagatgactcatgatgagcaatgttaagaaaaaagatgtgccgctgataagcatcagcctggtggccattcttttcatcgcagctgcattaagccttttcccacaacaatcggccgacgcggccaacgcaatatacacttttgttacgcgtacgttaggttccgccgtacaggtattggttttgctggcaatgggactggtgatttatttagccaccagtaaatacggcaatattcgtcttggcgaaggaaaaccggaatacagcacgctctcctggctgtttatgtttatttgtgccggtttaggttcttctacgctttattggggggttgctgaatgggcctattattatcaaacacctggattaaatatcgcaccgcgttcacaacaggcactcgaatttagcgttccctactctttcttccactggggcatcagcgcctgggcaacttatacgctggcctcataaatcatggcttatcactttcatgtgcggaaaaacaaaggtctgagcctttccggcattattgctgctattaccggcgttcgcccgcaaggcccatggggaaaactggtcgatttgatgttcctgatcgccactgtcggcgcactgaccatttcccttgttgttaccgcagcaacctttacccgtgggctttccgcgctgaccggtttacccgataacttcaccgtgcaggcatttgtgatcctgctttccggcggcattttttgcctaagctcgtggattggtatcaacaacggtttgcaacgtctgagcaaaatggttggctggggcgcgttcctgctgccattactggtgctgattgtcggcccaaccgaatttattaccaacagcatcatcaatgccatcggcctgaccacgcaaaacttcctgcaaatgagcttattcaccgatccgcttggcgatggttcatttacccgcaactggaccgttttctactggctgtggtggatctcatacacccctggcgtagcaatgtttgtcacccgcgtttcccgcggtcgtaagattaaagaagttatctggggactgatcctcggcagcaccgtcggttgctggttcttctttggcgtaatggaaagctatgccattcatcagtttatcaatggcgtaatcaacgtcccacaggtgctggaaacactgggcggcgaaacagctgtacagcaagttctgatgtcgttgccagccggtaaattgttcctcgccgcatacctgggcgtgatgattattttccttgcctcgcatatggatgcagtggcctacaccatggcggcgaccagtacgcgtaatctccaggaaggtgacgatcctgaccgtgggctgcgtcttttctggtgcgtggtgatcactctgatcccgctttccatcttgtttaccggtgcttcgctggaaacgatgaaaaccaccgtcgtgctcacagcccttcccttcctcgtcattttactggtgaaagtcggcgggtttattcgctggctgaaacaggattacgccgacattccggctcatcaagttgaacattatctcccgcagacaccggttgaagccctggaaaaaacgccagtgctccctgcgggaaccgtattcaaaggcgacaactgagcgccatcatcctaacgataaaggtatccctatgagcaatctgagccctgactttgtactacccgaaaatttttgcgctaacccgcaagaggcgtggaccattcctgcccgtttttataccgatcagaacgcgtttgaacacgaaaaagagaacgtcttcgccaaaagctggatttgcgtcgctcacagcagcgaactggcgaatgccaatgattatgtgacgcgtgagatcattggcgaaagcatcgtgctggtacgcggtcgtgataaggttttgcgcgcgttctataacgtgtgtccgcaccgtggtcatcagttgttgagcggtgaaggaaaagcaaaaaatgtgattacctgcccgtatcacgcatgggcattcaaactcgatggcaacctggcccatgcacgtaactgcgaaaacgtcgccaatttcgatagcgacaaagcgcaactggttccggtgcgtctggaagaatatgccggattcgtcttcatcaacatggaccccaacgccaccagcgtagaagatcaattacccggcctgggcgcgaaagtgctggaagcctgcccggaagtccacgatctgaaactggcggcccgctttaccacccgcacgcctgccaactggaagaacattgtcgataactatctcgagtgctatcactgtggtccggcgcatccaggtttctccgactccgtacaggttgatcgttactggcacaccatgcacggtaactggacgctgcaatacggtttcgccaaaccgtccgaacagtcgtttaaatttgaagagggtacggatgcggcattccacggtttctggctgtggccgtgcacgatgctgaacgtcaccccgatcaaagggatgatgacggtcatttatgaattcccggtggattctgaaactaccctgcaaaactacgatatttacttcaccaatgaagagttaaccgacgagcaaaaatcgctgattgagtggtatcgcgatgtgttccgtccggaagatttacgtctggttgaaagcgtacagaaagggctgaaatcgcgtggctatcgtggtcaggggcgcatcatggccgacagtagcggtagtggcatttccgaacatggtatcgcccatttccataatctgctggcgcaggtgtttaaggactaatgacatcggcggcggtattttccgccgctgggctgatttttgatggagtacagcaatgtcagactatcaaatgtttgaagtacaggtgagtcaggtggaaccgcttaccgaacaggtgaaacgcttcacgctggtggcaaccgatggcaaaccgctgcctgcgttcaccggaggaagtcacatcattgtgcagatgagcgatggtgataaccagtacagcaatgcgtattcactactgagttcgccgcatgacacctcttgttatcagattgccgttcggctggaggaaaactcgcgcggcggttcccgctttttgcatcagcaggtaaaagtgggcgatcggttaacgatttcaacgcctaataacctgtttgcgctaattccctcagccagaaagcatctgtttatcgcgggcggtattggtatcacccctttcctgtcgcacatggcagagctgcaacacagcgacgtcgactggcagctacattactgctcgcgaaatccagaaagttgcgcatttcgtgatgagctagtccagcatccgcaggctgagaaagtccatttgcatcattcatcaaccggaacacgactggaattagcgcgattattggcggatatcgaacctggcacacacgtttatacctgtggccccgaggcgctaattgaagcggtaagaagtgaagctgcgcgtctggacatcgccgccgatacgctgcactttgagcaatttgctatcgaagacaaaaccggcgatgcatttaccctggtgcttgcccgttccggaaaagagtttgtggtgccggaagagatgactattttgcaggttattgaaaataataaagccgcgaaagtggaatgtttatgtcgtgaaggggtatgcggaacctgcgaaacagcaatactggaaggtgaagctgaccatcgggatcaatattttagcgatgaagagcgtgccagccagcaaagtatgttgatctgttgttcgcgtgcgaagggtaaacgcctggtgttggatttgtagtttgccgaagccggatgtggcgctgagcgcgcccagtccggcttcggaagattttactgcggatattcctgcaataaattgtgtaatgcttccgccatcagctcaccacgccagccggaaatcagctccggcaaattgttctgcggtttcagtttccagtgccagttcagcagttggttgatttgccgacgcgatgccagcaattcggcgctgatcttatgcgtttcgctcacgtcagtaatcagcgacttaatcgctttaaacgctttacgataacccggcatgtccatcaggttaagcatcggctgcggtaaggcatcttccggcaatgtctgcgctttttccaccagcgctagcagcgttttaccgtgaaagcggatttcgctaccggataaacccaggctgtccagttcgcctaaacttcccggcatataacgcgctaccgaccacaaatgctcttcacgcacgacaaagttcaccgccagatcgcgctctcgcgccttgcgcagtcgccagtcggctaacagttgcagacaggccagttggcgtgtgcgtaattgccaggcattggtgatatcacgccaggcatcttccggcgcaacgacttcctgacgacgcatttgcatcaggcggcattcatccagcgccgcaggtagccagccggaggcctccgtttctaccataagcttggcggtgatcggtaacagataccagacatccgccgctgcgtattcacactgacgttcggtcagcggtctggccagccagtcggtgcgcgattcactcttgtccagcgtaacgccggaatactcttccaccatggaagcgaaaccccatgacatcgggcgtccgcagaaggcagcaaggatttgcgtgtcaatcaagggttgtggtaattcgccaaagacattgaggaacacttccagatcttcactgcctgcatggagaaattttgtgatggacggatcgcgcaggatcgctttcagcggtgaccagtcggtgatcccgagtggatcgattagcgccagatgctcgccatcgaaaagttgaatcaaccccagctgcgggtaataagtgcgcgtacgaacaaattcagtatccagggctatcgccggaaaggcacggacggcttcacacaaagaagccagcgcatcgtccgtggtaatcatttggtaattcaaattgttttctctttagtgggcgtcaaaaaaaacgccggattaaccggcgtctgacgactgacttaacgctcaggctttattgtccactttgccgcgcgcttcgtcacgtaattctcgtcgcaaaatttttccgacgttagatttcggtaactcatcacgaaactccaccagcttcggtactttgtatcccgtgagctgacggcggcaaaaagtcaccagtgactcttcggtaagcgatggatcttttttcactacgaagattttcaccgcttcaccactggagccggaaggtacgccaacagccgcgacttcctgtacgccaggatgctgcatgacgacatcttcaatctcgttgggatagacgttaaaaccggaaaccagaatcatgtcttttttacgatcgacaatgcgcaggaatccttcttcatccattaccgcgatgtcgccggtgtgtaaccagccatttttgatgatttcatcggtagcatcgggacgctgccagtaacccagcatcacctgcggtcctttgacacaaagctcacccggttgacctggtggtacttcattatcatcatcatccaccagtttggcttccgtcgacggcaccggcaaaccgatgctaccactatgataatcaatatcatatgggttaacgctgaccagcggcgcacactcggtaaggccatagccttccagcagatactgtccggtcagtttcacccaacgctctgccaccacttgctgcactggcatcccaccgcctgcggaaagatgcagactggagaaatccagctgctggaactctttattgttcagcaacgcattgaacaaggtgttaacgcccgtgatagcggtaaacggatatttcgctaactcttttaccaaccctggaatatcgcgcgggttagtgataagcaggttctgcccacccagttcgataaacagcaggcagttaatggtcagggcaaaaatgtgatacagcggcagcgccgtcaccaccagctctttgcccggatgcaacagcggaccataggtcgcgttaacctgttccaggttcgccagcatattgcggtgagtcagcatcgcgcctttcgccacaccagtggtgccgccggtgtattgcagaaaagctaaatcttccggcaccagttcgggtttgacgtactgcatccggtagccgttatgcagtgcgctacgaaatgaaatggcatctggcagatggtatttcggcaccaaacgcttgatgtatttaacaacgaaattgactaccgtgccttttgccgtagatagctgatcgcccatacgggtcagaattacgtgctgaacggcggttttatcaaccactttttccagtgtgtgagcaaagttagacacgataacaatcgccgatgcgccgctatcgttaagctgatgctcaagctcacgcggggtatacaacgggttaacgtttacgacgatcatcccggcacgcaaaatgccaaacagcgccaccggatattgcaataaattaggcatcatcaacgcaacgcgatcgcctttcttcagccccaacccttgttgcaaataagcggcaaacgcgcgactgcgttcttccagcttgcggaaggtcattacctcccccatattcacaaacgcaggttgatcggcgtagcgcgcgaccgactgctcaaacatatctaccagagattgataacggtcagggttgatctccgtcggaacgtccgcgggataacggttaagccaaaccttcttcaattcttcacctctaaaatgcgtgttcgtcgtcatcgcaaccccaaatgatatacatgccgttaacataatattaactcatcataccagcttgataattacccaacgaaaaggttgcgaagcgcgtcactatttatttttatctttaccgtaagaatgcagaaacagcggaccagccgctgtttctttttctttaaaaacaagcaattattcagttacaactgtttgtactctcgcggggccgggattataccagccccatccgccgtagccatagggccagccacgaccgccataaaaccatggatcaatcggctgaggcggcataatcacctgctgggttaaatgccaacgtttgtaacccgttacttgcatcaccataaatttatagggcgtattgccgattttgccgtcaaccgcaccagtgattggcccgactaccgtaaccagttgtccacggaaatccaccgggtccagaaaaccgttcacatcggcataaatgcgaccgcgagaaggttctcccagcgtcggtctggctccgctgtccagcggtacggtagcaatttccaggcgagttttcccttgctggttttgtaccgcaaccactttgccaccaaagcgtgcctcctgaccaacgtacagctgcggcgcactcatcacccgaactaaatcttgttgcggcgtgggactgctgcctttaatggcgtccggcacagtgacacaaccgctcagcattagcgcaaacgtacctgccagtatgcctttgataacattcttttgaaccgccatggtgcgactcctttttttctcagggcatactcttaagattcattctttgcccggaagtttcttccatgcgacgttgttacgtaaataaaccggttcggcatgttccaccgccaccgttttaccctcagcaaacatctgacacgcaatcggcagcatatcttcagcagcaggcagtaacacttcgccatcgcgcaaaaccagcccgctctctttaccgagatccggccaagcttgccagcccgtccctaccgtcacccattcgccggaaagctgttgcattcgttcatggacgatttcgggtttgagtacggcttcggtttcttcaccgtgccagataccgttttcatcacgctgatattcggcccagtaaacttcgcccattcgcgcgtcaatggctgccagcacgcgggttgcgccgtttttgcgccacgccccttgcgccatcgtcattagcgtggagacgccaatcatcggtaattccgcgccaagcgccagcccttgcgcgatgccaataccaatgcgcacgccagtaaagctaccggggccgcgcccgtaagccagagcgttaatatcagtcagggaagttccgctggtggtcaggatatcctgcaccatcggtaagattcgttgagtatgttcacgagggcaaagctcaaaatgagcgttgacagtaccgtcgttccacagggcgacagagcaggcctctgtcgcggtatcgatagccagaattcgcatgggtcttcgtgcttagatcaataaaaaggcgcgcatcataccatactccgtaacaaattacctggaggatggtatcgcaaggaaacgaaccgcacgggcaatgtcacgggtgcgtggcgcgggcggcagactggcgagaaacgtcgcgccgtaaggacgcatcaccagccgattgtcacaaatcaccagcacgccacgatcgtcggcgtcgcgaatcagtcgccctaccccctgtttgagagtaatgacggcatctggtagttgcacttcatcgaacgggtcgccaccgcgcaaacgacaatcttccatgcgcgcttttaacagtggatcatccggcgaggtaaacggcaatttgtcgataattaccaatgacaatgtatcgccacgcacgtccaccccttcccagaaactactggttgccacaagaagcgcattaccggcactgacaaactgctgcaacagttggcctttactggtttccccctgcaacaaaacgggaagcgtcatggtagcgcggaactgctcggccagatcgcgcatcatggcgtgcgaggtacaaagcataaaacaacgaccgttgttagcttcgatgatcggtcgcagcattgccgctaactggcgagcagaacctggctggttggtttgcggcagattgcgcggcacacagagtaacgcctggcggctgtaatcaaacgggcttggcaatagcaacgactccgcctgttctatcccaagccgcgaggtgaaatgatgcagatcgtcgttcaccgacagcgttgctgaggtgaagatccagctaccgggcttttgcgccattaactctttgaatttatccgccacgctgagcggcgtgagagccagagtaaaatggcgcgaagtgcattcgtaccagtagctgtagcccggctgattgatctcttttagccgcttcagccgtgtgcgatacaacgtggcgcgctcaaatgccgcatccagcaaggcggaacgccccagtgacagttttgccacgtcataacaaagttccagggtgtcatcgagcagtaaaaatgcccgctgaatttgcggattagctaacagctcacgcaggttaccgcgataacctggctcaccgagttgcagacgaaaatcctgcgcactctgggcaagacgatcagcgcacttttgtaactgctgggtgtcttttaattcggtgcggtaggcgatggtgatgtcttttgccaggtcgagcagttgtcgactggagagtgactgaccaaaatactggctggcaatgtccggtagctggtgggcttcgtcgaagatcatgacgtccgcttccgggatcagttcgccaaatccactctctttaaccaccatatccgccagaaagagatgatggtttaccaccaccacatcggcgtccatcgcttttttacgtgctttgaccacaaagcaatctttatacatcgggcagtcgctgccaagacagttgtcgttggtgctggtgaccagcggccacgcctgtgaatcttccgccacgctgacgcaggtgctgatatcaccatcgactgtttgattagaccaggagcgcagcaggatcacatcgcttaagatttgtaccggcagatcgccccccgccagcgcctgctgttcgagacgttcgaggcagaggtagtttgagcgccctttcagcagcgccacgttgcccgtatatttcaatgcctttgagactgttggcaaatcgcggctgtagagctgatcctgcaacgcttttgagccggtcgagataatgactttctttttcgcccgcagcgcaggagccaggtaagcgtaggttttgcccgtaccggttcctgcttccaccaccagcggctggcctttttctatcgcctgggtgacggctaccgccatctgtcgctgtggttctcgcggcttaaagcctggtatcgctttcgccagctgaccgtctggtgcaaaatcgtccgtcacactaccccctgttgatttgaacagggattatgtcaggatgagggcgctttcgccagttgaagtggtgacggcgacctcacattgtggcagtctttgcagcacgaaaatggaaggataatgaggacaaaatgatgactatcgttcgtatcgatgctgaagcccgctggtctgatgtggtaatccacaacaacacgctctactacactggtgtaccggaaaacctcgacgccgatgcctttgagcaaaccgccaacacgctggcgcagattgatgccgtgctggaaaaacagggcagcaataaatcgagcattctggatgccaccattttcctggccgataaaaacgacttcgcggcgatgaataaagcgtgggatgcctgggttgtcgcgggtcatgcgccggtgcgctgcacggtacaagcgggtttgatgaacccgaagtataaagttgaaattaagattgtggctgcggtgtaagctttatcgaagcaaaataagtcagacgataatttatcgataatactggtcggtttaacataaatcgaccagagattaagatattacctgttgatgctcctgctaattcattatttatttttataatttcaattttatctataaaactaactatataaataaccataaccatgccgttgtgttcgccctctgactagcaactctggttttctttcttagctgaataatctggttatagcgtgaggactgaccgttaaatttctccatcttactggataacacaccatgagctgctacctttaaaacacctgaatgtcaacaggttaactcgtgccatatcgttataatccctttgatattagatgcaaattaaggtcatatatagtcttatcgataacatggttaattttaaggataagaatatgcctgctgtaatagataaagccctggatttcattggtgccatggatgtatcagcgccaacaccaagttcgatgaatgaaagcacggcgaagggaatctttaaatatttaaaagaactgggagtacccgcgagtgccgctgatattacagcgcgagctgaccaggaaggctggaaccctgggttcacggaaaaaatggttggatgggcaaaaaaaatggagacaggtgaacgctctgtgattaaaaatcctgaatacttttcaacatatatgcaggaagaactaaaagcactggtctgagttaaatttatatcagcataaatgggtcaggacgcttttaatcacatataaaaagcgtcctttttctcacaatcaaatgttcatcggcttctataacgaaatcgatacggattagtgtgttactcgtcttcatcctcaaaacgcgccacgattcgctcgccggagtggttggcacgcagctcttctgccaccagcgcgattgcctggccgctgctcatcccttgtgccatcagttcctggatccgctcgacagctttttgctgctgttcatgggtgagtgaaggtaaacctgcaaacattgttaactcctgctaaattgttggcgctaattatttcatgctacccggcacatagccagtagagtcaggactgatgaagacgttatctcccgctgtgattactttaccctggcgtcaggacgccgctgaattttatttctcccgcttaagccacctgccgtgggcgatgcttttacactccggctatgccgatcatccgtatagccgctttgatattgtggtcgccgatccgatttgcactttaaccactttcggtaaagaaaccgttgttagtgaaagcgaaaaacgcacaacgaccactgatgacccgctacaggtgctccagcaggtgctggatcgcgcagacattcgcccaacgcataacgaagatttgccatttcagggcggcgcactggggttgtttggctacgatctgggccgccgttttgagtcactgccagaaattgcggaacaagatatcgttctgccggatatggcagtgggtatctacgattgggcgctcattgtcgaccaccagcgtcatacagtttctttgctgagtcataatgatgtcaatgcccgtcgggcctggctggaaagccagcaattctcgccgcaggaagatttcacgctcacttccgactggcaatccaatatgacccgcgagcagtacggcgaaaaatttcgccaggtacaggaatatctgcacagcggtgattgctatcaggtgaatctcgcccagcgttttcatgcgacctattctggcgatgaatggcaggcattccttcagcttaatcaggccaaccgcgcgccatttagcgcttttttacgtcttgaacagggtgcaattttaagcctttcgccagagcggtttattctttgtgataatagtgaaatccagacccgcccgattaaaggcacgctaccacgcctgcccgatcctcaggaagatagcaaacaagcagaaaaactggcgaactcagcgaaagatcgtgccgaaaatctgatgattgtcgatttaatgcgtaatgatatcggtcgtgttgccgtagccggttcggtaaaagtaccagagctcttcgtggtggaacccttccctgccgtgcatcatctggtcagcactataacggcgcgactaccagaacagttacacgccagcgatctgctgcgcgcagcttttcctggtggctcaataaccggggctccgaaagtacgggctatggaaattatcgacgaactggaaccgcagcgacgtaatgcctggtgcggcagcattggctatttgagcttttgcggcaacatggataccagcattactatccgcacgctgactgccattaacggacaaatatactgctctgcgggcggtggaattgtcgccgatagccaggaagaagcggaatatcaggaaacttttgataaagttaataagatattacgccaactggagaagtaagacgtggaataccgtagcctgacgcttgatgattttttatctcgctttcaacttttgcgcccgcaaattaaccgggaaaccctaaatcatcgtcaggctgccgtgttaatccccatcgtccgtcgaccgcaaccggggttgttgctgactcagcgttcaattcatctgcgtaaacacgctggacaagtggcattccctggaggtgcagtcgatgacacggacgcatcagttatcgccgccgcgctgcgcgaagctgaagaagaggtcgctataccgccttccgccgttgaagttatcggcgtgctgccgcccgtcgatagcgtaactggctatcaggtaaccccagtggtcggcattatcccgcccgatctgccgtatcgcgccagtgaagatgaagtctcggcggtgtttgaaatgccgctcgcccaggcattacatctgggtcgttatcaccctttagatatctaccgccgtggcgattcacatcgggtatggctgtcctggtacgaacagtattttgtatggggaatgaccgcatgcataattcgtgagctggcgctgcaaattggtgtgaaaccctgactatacttatctttacatctacaaaacactacttgagacaatcatcgcaatattagttaaatcgcggtttttgattagtttaattcatgtgaatagttaagccagtcgccgcgttccctcttacactatgcgctgttattagttcgttactggaagtccagtcaccttgtcaggagtattatcgtgattagtctattcgacatgtttaaggtggggattggtccctcatcttcccataccgtagggcctatgaaggcgggtaaacagttcgtcgatgatctggtcgaaaaaggcttactggatagcgttactcgcgttgccgtggacgtttatggttcactgtcgctgacgggtaaaggccaccacaccgatatcgccattattatgggtcttgcaggtaacgaacctgccaccgtggatatcgacagtattcccggttttattcgcgacgtagaagagcgcgaacgtctgctgctggcacagggacggcatgaagtggatttcccgcgcgacaacgggatgcgttttcataacggcaacctgccgctgcatgaaaacggtatgcaaatccacgcctataacggcgatgaagtcgtctacagcaaaacttattattccatcggcggcggttttatcgtcgatgaagaacactttggtcaggatgctgccaacgaagtgagcgtgccgtatccgttcaaatctgccaccgaactgctcgcgtactgtaatgaaaccggctattcgctgtctggtctcgctatgcagaacgaactggcgctgcacagcaagaaagagatcgacgagtatttcgcgcatgtctggcaaaccatgcaggcatgtatcgatcgcgggatgaacaccgaaggtgtactgccaggcccgctgcgcgtgccacgtcgtgcgtctgccctgcgccggatgttagtttccagcgataaactgtctaacgatccgatgaatgtcattgactgggtaaacatgtttgcgctggcagttaacgaagaaaacgccgccggtggtcgtgtggtaactgcgccaaccaacggtgcctgcggtatcgttccggcagtgctggcttactatgaccactttattgaatcggtcagcccggacatctatacccgttactttatggcagcgggcgcgattggtgcattgtataaaatgaacgcctctatttccggtgcggaagttggttgccagggcgaagtgggtgttgcctgttcaatggctgctgcgggtcttgcagaactgctgggcggtagcccggaacaggtttgcgtggcggcggaaattggcatggaacacaaccttggtttaacctgcgacccggttgcagggcaggttcaggtgccgtgcattgagcgtaatgccattgcctctgtgaaggcgattaacgccgcacggatggctctgcgccgcaccagtgcaccgcgcgtctcgctggataaggtcatcgaaacgatgtacgaaaccggtaaggacatgaacgccaaataccgcgaaacctcacgcggtggtctggcaatcaaagtccagtgtgactaatacttcttactcgcccatctgcaacggatgggcgaatttatacccgctttctcgtctgctgtaatattccccactacacttccactgttgcgtcaggcgtttgtcgccatacgcttacagggtggcccgcatgcaaaaagcacaacggatcattaaaacctatcgccgtaatcgaatgattgtttgtacgatttgcgcactcgttacgctcgcttcgaccctgagcgtgcgatttatttcacagcgtaacttaaatcaacaacgggtagtacaattcgccaatcacgctgtagaggaattagataaagtactgcttcccctacaggcaggtagcgaagtcttgcttccgctgattggtctgccctgctctgtcgcccatttgccattacgtaaacaggcggcaaaactccaaactgtgcgatccattggcctggtgcaagacggcacactctattgctccagcatttttggttatcgcaatgtgcccgtcgtggacattctggctgaacttcctgcaccgcaaccacttttacgcctgacgatcgaccgtgccctgattaaaggcagtccggttttgattcaatggacgcctgcagcgggcagtagcaatgctggggtcatggagatgattaacatcgacttactgacggcaatgctccttgagccacaactgccgcaaatcagtagcgccagcctgacggtggacaaacggcatttgctctatggtaatgggctggtagattcccttccgcaacctgaagacaatgaaaactatcaggtttcttcgcaacgctttccttttaccattaacgttaatggtccgggggctacggcgctggcatggcactatcttccaacacaattaccgctggcggtgctgctaagtttactggtgggctacatcgcctggctggcgaccgcttaccggatgagcttttcccgcgaaatcaatctgggcctggcgcaacatgagttcgaattgttctgtcagcctttgcttaatgcgcgcagccagcaatgtattggtgtagagattttgctgcgctggaacaatccgcgtcagggctggatttcaccggatgtgtttattcctatcgcggaagaacatcatttaattgtgccactgacccgctatgtgatggcagaaaccattcgtcagcgccatgttttcccgatgagtagtcagtttcatgttggcattaacgtcgcacccagccattttcgccgtggtgtgctgataaaagatctcaatcagtactggtttagcgctcacccgattcagcaactgatcctcgaaatcaccgaacgcgatgccttactggatgttgattatcggattgcccgcgagctacatcgtaaaaacgtcaaactggcgattgatgacttcggcaccggcaacagttcattttcctggcttgaaacattacgtcctgacgtgctgaaaattgataagtcatttaccgcagctataggttctgacgcggttaactcgacggtgaccgatatcatcatcgcgctggggcaaagactgaatattgaactggtggcggagggcgtggaaacgcaagaacaggcgaagtatttgcgccgtcatggcgtgcatattttgcaagggtatttgtacgcacagccgatgccgctacgtgattttcccaaatggctggcgggcagccaaccgccgcccgcccggcataatggacatatcacgcccattatgccgttacgttaacgcttactcatcttcatcgtgcgccggttgctctttaacaatgcgaaccagatcaacacgataatcattggcttcaatgatggtgatatgcagtggccctacatcaatcacatcgcccacacggggaatgtgaccatttgccgagatcaccaggcccgcgaccgtcgcgatatcatcgtcatcggcaaggtgctcaacatcaagcgcctgctgcaaggcatgcaaatctgtaccgccttttaccagccagccgtcaccatcagtaatgatttccggcgtttcgtcagcgtccgggaattcacccgcaatggcttccagcacatccagcggcgtgaccaagccttgtaccacaccaaactcgttggtcacgataacaaagctcccgcgagcgcgacgcagcacgcccagcaggttgatcggatcgagggtttccgggacgataatcgccggagacgccgaagcaatcgccgccacatcaacgccctcttccagcgccaccagcagttctttagcacgtacgattccgatgatttcatccagttcaccgcgacataccgggaacaggctgtgcggtgaggagagcagctgctcgcggatttcatcgaccccgagattagcgtcaacccagcttatttcaccgcgcggcgtcatgatcccgcgcagagaacgcgacgccagcgtcagtacgccgttaatcatgtaacgttcttcttcggcaaatgcaccttccgggatcggcatcggcatcgggttatcggcatcgtgctgaacattggcctgacgtttcccgcccatcaaacgcaggatggcatcggcagtacgcgctcgcagcggcaaagtcgactggtgacgaataaagttgcgacgcgcaatctggttaaacacttcgatgatgatcgagaagccaatcgcggcatacaggtaacctttcggaatgtggaaaccgaaaccttctgccaccagactcagaccaatcattaacaggaagctcagacagagcaccaccaccgtggggtgctggttaacgaatcgcgtcagcggtttggatgccagcaacataaccgccatcgcaatcactaccgccgccatcatcaccggcagatggttaaccatccctactgcagtaattaccgcatccaacgagaagacggcgtcaaggatgacaatctgtgtgacgaccacccagaaactggcgtagcctttaccgtggccggaatcatgatcgcggttttccagccgttcatgcagttcggttgttgctttgaacagcaagaatatccccccgaacaacataatcaggtcgcgtccggagaaggagaaatccatgacggtaaatagcggtttggtcagcgtgaccatccatgaaatcagcgacagcagccccagacgcataatcagcgccagtgataaccccagcaaacgcgctttatcgcgttgttttggcggcagtttgtcagcaagaatggcgatgaagaccaggttatcgatacccagcacaatttcgagaacaacaagcgtgagtagccccgcccaaattgaggggtccattaagaattccatgacaagctcctgcttaaggaatagctattcgacgccagaaataatgcaggcgtaacgacaaaatgcaaacgaaaggtgcggcatagagagccagaaaggcaggcgttaaaaggcctgatgctgaaatgacgtcggtgacgatccatactgcgggctactgccctatactccatggttgttaaacgggagttaaacatatcagagacgcctctgatttggcaaagatttaccttcctttgcaaacgaatgtgacaaggatattttacctttcgaaatttctgctaatcgaaagttaaattacggatcttcatcacataaaataattttttcgatatctaaaataaatcgcgaaacgcaggggtttttggttgtagcccttatctgaatcgattcgattgtggacgacgattcaaaaatacatctggcacgttgaggtgttaacgataataaaggaggtagcaagtgaccattgctattgttataggcacacatggttgggctgcagagcagttgcttaaaacggcagaaatgctgttaggcgagcaggaaaacgtcggctggatcgatttcgttccaggtgaaaatgccgaaacgctgattgaaaagtacaacgctcagttggcaaaactcgacaccactaaaggcgtgctgtttctcgttgatacatggggaggcagcccgttcaatgctgccagccgcattgtcgtcgacaaagagcattatgaagtcattgcaggcgttaacattccaatgctcgtggaaacgttaatggcccgtgatgatgacccaagctttgatgaactggtggcactggcagtagaaacaggccgtgaaggcgtgaaagctctgaaagccaaaccggttgaaaaagccgcgccagcacccgctgccgcagcaccaaaagcggctccaactccggcaaaaccaatggggccaaacgactacatggttattggccttgcgcgtatcgacgaccgtctgattcacggtcaggtcgccacccgctggaccaaagaaaccaatgtctcccgtattattgttgttagtgatgaagtggctgcggataccgttcgtaagacactgctcacccaggttgcacctccgggcgtaacagcacacgtagttgatgttgccaaaatgattcgcgtctacaacaacccgaaatatgctggcgaacgcgtaatgctgttatttaccaacccaacagatgtagagcgtctcgttgaaggcggcgtgaaaatcacctctgttaacgtcggtggtatggcattccgtcagggtaaaacccaggtgaataacgcggtttcggttgatgaaaaagatatcgaggcgttcaagaaactgaatgcgcgcggtattgagctggaagtccgtaaggtttccaccgatccgaaactgaaaatgatggatctgatcagcaaaatcgataagtaacgtattgtgttgattatcactcagttttcacacttaagtcttacgtaaacaggagaagtacaatggagattaccactcttcaaattgtgctggtatttatcgtagcctgtatcgcaggtatgggatcaatcctcgatgaatttcagtttcaccgtccgctaatcgcgtgtaccctggtgggtatcgttcttggggatatgaaaaccggtattattatcggtggtacgctggaaatgatcgcgctgggctggatgaacatcggtgctgcagttgcgcctgacgccgctctggcttctatcatttctaccattctggttatcgcaggtcatcagagcattggtgcaggtatcgcactggcaatccctctggccgctgcgggccaggtactgaccatcatcgttcgtactattaccgttgctttccagcacgctgcggataaggctgctgataacggcaacctgacagcgatttcctggatccacgtttcttctctgttcctgcaagcaatgcgtgtggctattccggccgtcatcgttgcgctgtctgttggtaccagcgaagtacagaacatgctgaatgcgattccggaagtggtgaccaatggtctgaatatcgccggtggcatgatcgtggtggttggttatgcgatggttatcaacatgatgcgtgctggctacctgatgccgttcttctacctcggcttcgtaaccgcagcattcaccaactttaacctggttgctctgggtgtgattggtactgttatggcagtgctctacatccaacttagcccgaaatacaaccgcgtagccggtgcgcctgctcaggcagctggtaacaacgatctcgataacgaactggactaacaggtgagcgaaatggttgatacaactcaaactaccaccgagaaaaaactcactcaaagtgatattcgtggcgtcttcctgcgttctaacctcttccagggttcatggaacttcgaacgtatgcaggcactgggtttctgcttctctatggtaccggcaattcgtcgcctctaccctgagaacaacgaagctcgtaaacaagctattcgccgtcacctggagttctttaacacccagccgttcgtggctgcgccgattctcggcgtaaccctggcgctggaagaacagcgtgctaatggcgcagagatcgacgacggtgctatcaacggtatcaaagtcggtttgatggggccgctggctggtgtaggcgacccgatcttctggggaaccgtacgtccggtatttgcagcactgggtgccggtatcgcgatgagcggcagcctgttaggtccgctgctgttcttcatcctgtttaacctggtgcgtctggcaacccgttactacggcgtagcgtatggttactccaaaggtatcgatatcgttaaagatatgggtggtggcttcctgcaaaaactgacggaaggggcgtctatcctcggtctgtttgtcatgggggcattggttaacaagtggacacatgtcaacatcccgctggttgtctctcgcattactgaccagacgggcaaagaacacgttactactgtccagactattctggaccagttaatgccaggcctggtaccactgctgctgacctttgcttgtatgtggctactgcgcaaaaaagttaacccgctgtggatcatcgttggcttcttcgtcatcggtatcgctggttacgcttgcggcctgctgggactgtaagactgttgtacactaccggggccttttggccccgtttttttatctggaggattaatgacaatcacggacctggtactgattcttttcatcgccgcactcctggccttcgcgatctacgatcagttcatcatgccccgccgtaacggccccaccctgctggcaattcctttgctccggcgtggtcgcatcgatagcgttatcttcgtcggattgattgtcattcttatctataacaacgtcacgaatcatggtgcgttaataacgacatggttattaagcgcactggctctgatgggtttttatatattctggatccgcgttccgaagatcatctttaaacaaaaaggttttttcttcgccaatgtctggattgaatatagccgaatcaaagcgatgaacttgtcggaagatggcgtgttggtgatgcaattagaacagcgtcggctgttaatccgcgttcgaaatatcgacgatctggaaaaaatttataagcttctcgtttcaactcaataagttatgaatttagccaaagctatgtttagtgtatttttaataatcagacatagcttaggctatattacctcttcccttatttgttatttattttaacgtttcattgatatataaatctaaatgaaaatcgttatcaataaagcaatgaaataatatattccaacagttgttttatattctcaaaatatgttaaggttgcgccctcatttggggagtagccgatttccagattccggaaatgtacgtgtcaacatactcgttgcaaaacgtggcacgtacggactgaatactttcagtcaggcgagaccatatgcacatcaatcgctatgcctgcatgaacgcgaaaacccatcgcggcttgttgttcatgtatgcatgtttgctgggggcgatgatgtgttttatggataccccggtcaggacgttgtcatgaatatcactgctactgttcttcttgcgtttggtatgtcgatggatgcatttgctgcatcaatcggtaaaggtgccaccctccataaaccgaaattttctgaagcattgcgaaccggccttatttttggtgccgtcgaaaccctgacgccgctgatcggctggggaatgggcatgttagccagccggtttgtccttgaatggaaccactggattgcgtttgtgctgctgatattcctcggcgggcgaatgattattgagggttttcgtggcgcagatgatgaagatgaagagccgcgccgtcggcacggtttctggctactggtaaccaccgcgattgccaccagcctggatgccatggctgtgggtgttggtcttgctttcctgcaggtcaacattatcgcgaccgcattggccattggttgtgcaaccttgattatgtcgacattagggatgatggttggtcgctttatcggctcaattattgggaaaaaagcggaaattctcggcgggctggtgctgatcggcatcggcgtccagatcctctggacgcacttccacggttaataagaacgctgccagaggtgaatattaaagtccgtctggcagtcgaacacttcttttgctgccagtgtttgccagacttctggcttcgcacgccaggcaaacggcgtcatctgcaataatgcgacggcttcatcaccgcgaagacgcatcggataacacaactcatcactctgctgtaatgtaaaaccttccagttgttctgcatgaggtgcatgaagatgtacttcattgtaaatcagccccttcagctccatcaaatgtcgcggtcccggcgtggcagtaatgacccagccgccgggcttcactactcgtgctaattcttctgctttacacggcgcgtaaatacgtattatggcgtccatactggtatcggaaaacggcaaacggtggctggaagcgacacaaagagtgacctgcggatagcgtttcgccgccgcttttatcgctaccttcgagacatccaggccaaacgtggtgatttcgggcaacacatcggcaaatgcgtgtgtgtaatacccttcaccacagccaatatccagcaccgccgtggccttttcatcaagccgttcccgcagttgggcgacaattgcatcacgcagcggctgataatgtccggcatctaagaatgcgcggcgtgcttgtatcatttccgcgctgtcgcccggatcacgagaccgtttatgctgaacgggcagcagattgacatacccttctttcgccatatcaaactgatgtcgctggggacagatatagctgtttttttcacgcgaaagaggctgatggcaaagtggacaggaaaacgacatgacaactccggcaggatactaaaggccgcaagtgtaacgcgaatcacgcggcgggcaaatatccgaacgccaggagcgaagataaagcatagtataaagcctcgcattcgacgaggctttatagcgagattgaagcgtattcacacttcagatcagtggattcgatcagatagctgttacgttaacagctgccggacctttctggccgtcctgaatttcgaactcaacgttctgaccttcagccagagttttgaagccattaccctggatagcggagaagtgtacgaacacatctttgctgccatcagccggagtaatgaagccaaaacctttagactcgttgaaccacttaacctgacctttaatctttgccatttgaaaaattccttagattgttttcttcgcccgcaggcataacatagataaaactgacacattactgcatgaggcaccaatataaggctcggcagagaagcggtattcaacgtcaacgtgtttactcaggacttctttactgaaaatgccacacataaacagaactgtacctcgtttaacccgaaatctgttatcacatacaacgttaattatggcaagccatttttaaacatgtctcgatcagacgcacaaatctcgatacgtcttccactttttttgcacacttatgcaacggaatacgcgccgatatatcattgtgcttaaccttgccagttcaggcagatacttaaactggcgtattttctaacatagttcaataagttcagttgttccaggccagtgggagaagttattacatagtgcgtgcaatatcacattttttgctatgcaatgaataaaaagttatatcactttttctcataaaacagtcagttaacggctatcaattaccctaaagagaagtcaatccccaaagggattgaaaatttaaaataagaaaaattgatgaatgagcaaaaaatcaagagagaaacgtttcgctaataaataataccacgcttaatcacaaatccgatgtaaacatcctaataaattaatgaggaaaatatctttttctgatatcccgttacgcaaataaataatatgataattatttgaagtcagaccagagttttaatttgaagcagttgcaccatggcagtgcgtataatcaggatgaattgagtaacccttcaacgacggggttactcaagattgaggaaggattatcgttcggcgaccagacgaataatatcttcgtcttcaaccgatttttgactctcaacggtctttttatctgctttctcaggttcgtttgcttcgcacaaacgacgtaacagtgcattttgacgtttttgctgatccagcaacgcctcaagcagttcaatctgttcgttagtccgagaactggcacgattgataaaaaaccacaagatgagcccgataagaagaaccaccaccgatacaaccaaagacgcaatgttcatcacgcctgaatttacaacttcgttcatttcaccacctctgagtagaggcgctattctaccactgctggagaggaagaaaatctagtgctgaaaaaatgatatcaccacgggataaactggttaatggcacaaattccgctgaaaaattgtacatcctgatcgcacatcatgttgaatacctgcgcccaaagcagcaagcaagccaacaccacgacaaccagaacgacccatcgaaactttttcactccaatctccgcttcacctaccttatgtcattaaactagcatgcgttagttaaacagcgcctaactatgtcgatattcgtgctttttcggaatgagtagcttgcttcagcgcatattgccgctacgattaagcgaacataaaaagagaagaggttgtaatgcgattcatcattcgcacagttatgctgatagcactggtatggataggattattactcagcggatatggcgttttgattggaagcaaagagaatgccgcaggattaggtttgcaatgtacctatctgactgccagaggcaccagcacggtacaatacttgcacactaaaagtggtttcttggggataacagattgcccactgttacgtaaaagcaatatcgtggtcgataatggttaagggtaataaataaccagattctcactcatgagtaaaatattcttatagcaagcgcgtttaatataacgcaccttcaactttatttttctcatgctaaataaagaacctgtctgtttgatattccgacaggttcttactctcatcagaacggatagtcgtgataacccatttgggcagaaattttgcgcgctgcggtatgcaacattgcgacatattcctgtaaacgctcttcagagaaacgcaacgtcgggaaggagatgctcaaaccggcaatgaccacgccaaagcgatcaaataccggtaccgcaatgcatcgcagcccttcttcctgctcttcgttatcttcgccatacccctgctcgcgcacctggtccagaacgggtaataacgcttctgtactggtgatggtccgctcggtactgcgtttatactccacgccctcaagaatttgcttcacttcatcgcgatcgcgccatgccagcagtaccttaccaatcgcggtgctgtacagcggattacgacgcccaatccgtgaatacatgcgcaaattgtacatagagtcaattttgtgaatgtaaacaatactgtcttcgtccagtgcgccgaggtggatagtttctttggtcaggcgggagatctcacgcatctggatatctgcgctacgaattaaatcgacgttttgtaacgcgcgagcgcccagttcaaacaatttcagggtcagggaatatttctccgactccccttcctgcgccacataacctaaggttttcatggtctgtaaaaagcgataaacggtgctttttgacatcatgacgcgctgcgacagctcggttatccctatttcgcgctcttcacccagcgcctgcaaaatgccaaaaacttttagcacggaagatacagaatcaggctgtttatccagatctgcgttagccatttatcacctcattgcgagtgttttataaaaatcagaactgttttttattataatttcgcaccagggtggtcgcaatccatcttttgccggttagttacaattctgcgacatccaccgtgaatatcagtgctagaatcatacccctgttgattattcaccaaagatataaaattcctatgccaaaagttcaggccgacggcctgccattgccccagcgatacggtgcgatattaaccattgtgattggtatttcgatggctgtccttgacggcgcaatcgccaacgtcgccctgccaacaatcgccacggaccttcatgccacgccagccagttccatctgggtagtgaacgcctatcaaatcgccattgtcatctccctgctctcgttttcgtttctgggcgatatgtttggctatcgacgtatttataaatgcggtctggtcgtttttctgttgtcttcactgttctgcgccctttctgattcgctgcaaatgctcacccttgcgcgtgtcatacaaggtttcggcggtgcagcgttgatgagcgttaataccgcacttatccgcctgatctatccacaacgttttctggggagagggatgggcataaactcgtttattgttgccgtctcttctgctgccgggccgacaattgctgcagcaatcctctccatcgcatcctggaaatggttatttttaatcaacgtaccgttaggtattatcgccctgcttctggcgatgcgttttctgccacccaatggttctcgcgccagtaaaccccgtttcgacctgcccagcgccgtgatgaacgcgttaaccttcggcctgcttatcactgcgttgagtggtttcgctcaggggcaatcgctgacgttaattgctgcggaactggtggtaatggttgttgttggtattttctttattcgccgccagctttctcttcccgtaccgctgctaccggtggatttactgcgtatcccgctgttttcactttctatttgcacatctgtttgctctttctgcgcacaaatgctggcaatggtttccctgcccttttacctgcaaaccgtgctcgggcgtagtgaagtcgaaacaggcttacttctgacaccgtggccgttagcaacgatggtgatggctccgttggcaggctatttgattgaacgcgtacatgcaggattgctgggtgctctagggttgttcatcatggctgcggggcttttttccctggttctgctgcccgcgtcacctgcggatatcaatattatctggccgatgatcttatgtggcgctggatttggcttgttccagtcacccaataaccacaccattattacctccgctcctcgcgaacgtagcggtggagccagtggcatgttaggaacggctcgtctactgggtcagagtagcggcgcggcactggtggcgctgatgctaaatcagttcggtgataatggtacgcacgtttcgctgatggctgcggctattctggcagtgattgctgcctgtgtcagtggtttacgtatcactcagccacgatccagggcataaaaaaagcgcgtcgatcaggacgcgctttttagtatttacttcatattacttcaggtattcacccgtacgcagagcttcaattcgtttatccagcggcgggtgagtcatgaacaactcactgagcgatttcgacttaccgttaatgcagaaagccatcatgctggttgcttcttgcggttcatagctggttttcaggcgctgcagcgcggcaatcattttctcgcgaccaaccagttttgccgaaccggcatcagcatggaattcacgatgacgcgagaaccacatggtgataatgctcgcaagaataccaaacaccagttccagaaccgttgcaaccgcaaagtagatcagcgggttgccgttgctctcttcaccttcatcacgatttccgcccataaaacccgcggcaagctgcgccagaatacgggaaataaagataacgaaggtgttcaccacgccctgaatcagcgtcatggtgaccatatcaccattggcgatgtggctgatttcgtgagcaattaccgcctcggcttcatccgggctcatgttctgcagcaaaccggtgctgacagcaaccagagaggcatcacggcgcgcaccggttgcaaaagcgttgatgtccggcgcatggtagatagccacttgcggcatagcgatccctgcctgacgagcctgggttgctacagtattaatcagccaacgttccctttcgttacgcggttgctcgatcacttccccgccaacagatcgtaatgccatccatttggacatcagaagcgaaacgaaggaaccaccaaaaccgaacagcaaggccatgatcatcagcccctgaacgctgctcgactgtatccctgtcaggctcagtaccagcccgaaaacgaccattacggccaggttcgttagcaggaagagcgcgattcgcatcataattttctttttacctcagtttaacaaaacgcaatatgcgatacccacatcgtatgggttacgcgactattttcaagtctggatagtgcgtaagtcaccagaaagacacaactttacattttgtagcatctgatttacggcatcttgccgctgttaaaaaatcaggcacaatttcttgtgcctgattgatattacttgacgggagcgggttgttccgcgggtctggctttttcaagcttcgccagatcgagtgcgatattcaccgtctcatccagataaggatccggctcctggtaatctttaggtagatcatccagcttcttcaactccggtttaccttcgcgtttaaagcgttcgttcaaacgcgccagacgcgtcgcatcatcttcattattctctttctcacgcacagcgtagttcagagaaacgatattgcgcttgtccttcatagcgttgaagcgcgcgatatccttcatgatgttctggaactcaggatctttcgcgatacgcgcattatgttccttcagcagctccggcccaaaggccgttaaatcgcctgatttcacataagtcgcggcatcaatgctatcccacggcagcgcgttatcttcgaatttctcacccgtttccgtttcttcattacccgtcggcatgatgatgtctggcgttacgcctttacgttgcgtactgccgccgttaacgcgatagaatttctggatcgtgtactgcacagaacccagcgctggccattcaggacgtaacatctgatcgtaaatacggttcaatgaacggtattgctgaacggtgcctttaccaaacgtcggttcacccacaaccagcgcacgaccgtaatcctgcattgccgcggcaaagatttctgaagccgaagcactgaaacggtcaaccagtaccaccagcgggcctttatagaacacctgcccgtcggtatcgctgtcttcacgaaccttgccgttgttatcgcggacctgaacaatgggacccgcaggaataaacagacctgagagcgataccgcttcggtcagcgccccaccgccattgctacgcaggtcgatgatcacactgctgacattctgtttttccagtttctgcagttgaactttgacatcgtctgtcaaacccacatagaagcccggaatatccagcacgccgactttctctttaccgacggtcttcaccgacattttaaccgcgcggtcttcgagacgaatacgttcacgggtcaatgttacagtgcgggtcttggtccctttaccagcaggtaaaatttccagacgaactttactgcccttcggccctttaattaaggcaaccacatcatcaagacgccagccaatcacgtcaaccatcggcttgcctgtttgaccaacaccgacaattttgtcaccaacgctgatagctttactcttcgctgccggaccacctgccaccatcgaattgataacggtgtagtcatcatccatttgcagcactgcgccaataccttccagcgacaaactcatttcagtgttgaactgttcggtattacgcggggaaagatagttggtatgcgggtcgatttcacgcgcaaacgccgtcattgccagcgagaaaacatcttcgctgttggtttgcgccagacgacgaatggcaaatttgtagcggcgtgtcagggtttcacgaatttctttatccgtttttcctgccagcttcaggcttaactcgtcgaatttgactttactgtcccacagcgcgttcaactcagcctcgtttttcggccagggcgctttgctgcggtcaaggttataagtgtcgttgccggtgaaatccatcggcttttccagtaccgacaaagcgtactggtaacgctcaaaacggcgcttttgcgccagattgtagagatcgtagaaaacgtcgagtttgcctgaacgcagttcatcgcctaactcggttttctttttcgcgaactgttcaacatcgcttgccagcagcacgttgtggctgtaatcgagcagattcaggtagcggtcaaagattttggccgaaaatgcctgatcgaggtcgaactggcgataatgagaacgggtgaagcgcgacgttacgcgctcacttaccgtcgcatgctgcgtctcttcctttaataccggaatttgatcagcacgcgtgatatcttctacagcgaaggtctggcctgctattgcaagcaggccagctaacgcggtaagcctaaaaaacatgttcatgcctggcccggcctccgtttcagaacaccaggtgttctgcgcgcacaatcaaagacatacccgaattcagctggacgcggacgccgtctttggtgatttctaatacggtggcatccatcgcgttttgacccgctttcaccttcagagcttgtccgacagtcagagctgaaatgtcagaaaccggggtgtgctgttcttcgcgaggtgcttttactgtttttggcgctttctctaccggcttttgcgcacgaggtttacgttcagcgccttctttgcggcgtggcgtggtcggacgtggcttgcgttcgcggcgcggtgcgtcttctttctcaccagcagctgcggcagcttcgcgttttttcgcttgctgttcagcacgctgtgcctgaacacgcgctttcgcttcttcaagctgcttgcgagcatgctctacatgttgctcgtccagctcaccgcatgggttgccgtcaagatcgacacgcgttgcgccgggtttaacaccgtaaagataacgccagctcgaagtgtagagacgtaaagcggatcgtaattgcgttttgctcaggttcatttccccggcaacacgatcgaccaaatcctgaaaaataccgattttcagcggacgcgcttcaccttccgcactgaaacagtggggaaaacgttcggccagaaacgcgattacttctttactgctattcaacttaggttgattttccatgaaatttcctgattacaacggacgtagccaacaagcgcaggcatgaacaggcgtcattataatgacgctaccagtaaatgctacgttatccgttgattatcctgcgacgctcgcaaagaattttttgtaatccgtcgttgcaagcactttttcaagctgtgccacaagctgacgtaagccttgctcgtcctcgtctgtaaagcgaccgaagacggtactatcgatgtcgagaacaccaataatctgatttttcaccaccagcggcagaacaatttcagaattactcgccgcatcacaggcaatatgcccgtcaaacgcgtgaacatcctcgatacgctgcacttgattgcgggcaaccgcagtgccgcacaccccgcgcccgacgggtatccggacacaggcaattttgccctgaaatggtccgagtaccagtgtatcgtcctcaagcaaataaaaacctgcccagtttacgtcagtgagacgctcgtataacaacgcactggtgttcgcaagcgttgccagaaaactggtttctcctgccatcagcgcgttaaagtcgcgatttaaatccgcgtaaaattctgttttgttcattatataatcacttggttgtcttacctggaactgccagcctattaaaataagcattaaatgcgttaatgctcaagatcattcccatcatgggttaatattaatgttaattcttattacatttggcacgtcatggctcttaacacaccacaaattacgccgacaaaaaagataacagtgaggtcaatcggcgaggaactgccgcgtggtgattaccaacgttgcccgcaatgtgacatgctgtttagcctgcccgagataaattctcatcagagtgcctattgtccgcgctgtcaggcaaaaattcgcgacgggcgcgactggtcgctaacgcgcctggcggcaatggctttcaccatgctgttgctgatgccgtttgcctggggcgaaccgctgttgcatatctggctgttaggcattcgtattgacgccaacgttatgcaaggcatctggcaaatgaccaaacagggcgatgcgataacggggtcgatggtctttttctgcgttatcggtgcccccctcattctggtgacctccatagcttatttatggtttggtaaccgactgggaatgaatctacgcccggtactgctgatgcttgagcgacttaaagagtgggtaatgctggatatctacctggtcggcattggcgttgcttctataaaggtacaggattatgcccatatccaggcgggtgtgggcttgttctcttttgtggcgttggtgattttaacgacggtgacgttgtcacatcttaatgtcgaggagctgtgggagcgattttatccgcagcgccccgctacgcgtagggacgagaaactccgtgtctgtcttgggtgccattttaccggctatcctgatcagcgtggtcgctgcccgcgttgccatatcccgctacgcgtgcgtcgccgtcatagtttgcaaaaatgctgggcggcgctgttagcgtcaatcgttttgttgttacctgccaacctgttgcctatttctatcatttatctgaacggaggacggcaggaagatacaattctttccggaattatgtcgctggcaagtagcaacattgcggttgcgggaatcgtgtttatcgccagtattctggtaccgtttactaaagtgatcgtcatgttcactttactgttgagcattcattttaaatgccagcaaggtttacgcacacgcattctgttactgcggatggtgacctggattggtcgctggtcgatgctcgacctgtttgtcatatctttaaccatgtcgctgattaatcgcgatcagatcctcgcttttactatgggaccggctgcgttttatttcggcgcagcggtaattttgactattcttgctgtggaatggctggacagccgcttactttgggatgcacatgagtcaggaaacgcccgcttcgacgactgaagcgcagattaaaaataaacgccgtatctcacctttctggctgctgcctttcatcgcgctaatgattgccggttggctgatttgggacagttatcaggaccggggtaataccgtcaccatcgactttatgtcggcggatggtattgttccgggccgtacgcctgttcgttatcagggcgttgaagtcggaacagtgcaggatatcagcctcagcgacgatcttcgtaagattgaagtcaaggtcagcatcaagtccgatatgaaagatgcgctgcgcgaagagactcagttctggctggtgacgccaaaagcatcgttggcaggtgtctccgggctggacgccctcgtcggtggtaactatatcggcatgatgccgggtaaaggtaaagagcaggatcactttgtcgcactcgatacccaaccgaaatatcgactggacaatggcgatctgatgatccacctgcaagcccccgatctcggttcgctgaacagcggttcattggtctatttccgcaagatccctgtgggaaaagtctacgactatgccatcaatcccaacaagcaaggcgtggtgattgatgtcctgatcgagcggcgttttaccgatctggtgaaaaaaggtagccgtttctggaacgtttccggcgttgatgccaatgtcagtatcagtggcgcgaaggtgaaactggaaagtctggcggcactggttaacggtgcgattgccttcgattcacctgaagagtcgaaacctgccgaggcggaagatacctttggtctgtatgaagatctggcccacagccagcgtggcgtaataataaaactggaactgccgagtggggcaggattaaccgccgactcgacgccattaatgtatcagggactggaagtcggacagctaactaaactggatttaaatcctggtggtaaagtcactggggaaatgacagttgatcccagcgtcgttaccctgcttcgtgaaaatacccgcatcgaattacgtaatccgaaattatcccttagcgatgccaatctcagcgccctgctgactggcaaaaccttcgagttggtacccggcgatggcgagccacgcaaagagttcgttgttgtgccaggcgaaaaagcactgctgcatgaacctgatgttctgacgctgaccctgaccgcgccggaaagttacggtattgatgctggtcagccgctcattcttcacggcgtgcaggtaggccaggttatcgatcgtaaactcaccagcaaaggcgtcacctttaccgtcgccatcgagcctcagcatcgcgaactggtaaaaggcgatagcaaatttgtcgtcaacagccgtgtcgatgtgaaggtggggctggatggcgttgagtttctcggtgccagcgcctcagaatggatcaatggcgggatacgtattctgccgggcgataaaggtgagatgaaagccagctatccactgtatgccaatttggaaaaagcgctggagaacagccttagcgatttacccaccacaaccgtgagtttgagtgcagagacgctgccggatgtgcaggcaggatcggtagtgctgtaccgtaaatttgaagttggtgaagtgattaccgtgcgtccgcgagctaacgcgtttgatatcgatctgcatattaagccggagtatcgcaaccttctgaccagcaatagcgtgttctgggcagaaggcggggcgaaagttcagctgaatggtagtggcctgaccgtacaggcatccccgctctccagagcattaaaaggggctattagcttcgataacctcagtggtgccagcgccagtcagcgtaaaggcgacaaacgtattctgtatgcttccgaaacagcggcccgtgcggttggtgggcagattacgcttcacgctttcgatgccggaaaactggcggtcgggatgccaattcgctatctcggtattgatatcgggcaaatccagacgctggatctgattaccgcgcgcaatgaagtacaggcaaaggcggtgctctatccggaatatgtccagacctttgctcgcggtggtacgcgcttctcagtggtcacaccgcaaatttcggcagctggcgttgagcatctagatactatcctccagccgtatatcaacgtcgaaccaggccggggcaatcctcgccgcgactttgaattacaagaggccaccattactgattcgcgttacctggatggcttaagcattattgttgaagcgccggaagccggttcgttaggtattggtacgcctgtgctgttccgtggtctggaagtcggtacggttacaggaatgacgctggggacattgtcagatcgcgtgatgattgcgatgcgcatcagtaaacgctatcaacacctggtgcgtaacaattccgtcttctggttggcatcgggttacagtctggactttggtctgacgggcggcgtagtgaaaaccggcacctttaaccagtttatccgtggcggcatcgccttcgccacgcctccgggtacgccactggcaccgaaagcccaggaaggcaaacacttcctgttgcaggaaagtgaaccgaaagagtggcgtgaatggggaactgcgcttcccaaataatgcccactgctccggcgtgcctgcgccggagcgtttatgctaaactgcgcgcctgtttttttgccagtggtacatgctcgtggcccaacacaccgtttatttcccggacgcctttctgacacaaatgcgcgaagcgatgccttcgacgctctcatttgatgattttcttgccgcctgtcagcgcccgttgcgccgcagcattcgcgttaatacgctgaaaatctccgttgctgatttcctgcaattaaccgctccttatggctggacgcttacgccaattccgtggtgtgaagaaggtttctggattgaacgcgacaatgaagatgcattgccattgggtagtaccgccgagcatttaagcggcctgttttatattcaggaagccagttcaatgttgcccgttgccgccttgtttgctgacgataatgcaccacagcgggtgatggatgtcgcagctgcgccaggctccaaaacgacgcaaattgccgcgcggatgaataacgaaggggcaatccttgccaatgagttttccgccagtcgggtaaaagtgttacatgccaatatcagccgctgtggcatcagtaatgttgcgctcacacattttgatggccgcgtgtttggtgcggcagtgccagaaatgttcgatgccattttgctggacgctccctgctctggcgaaggcgtggtgcgtaaagatcccgatgcgctaaaaaactggtcaccagaaagcaatcaggaaatcgcagctacacaacgggagcttatcgacagcgcctttcatgcattacgtcctggtggtacgctggtttactcgacctgtaccttaaaccaggaagaaaacgaagccgtttgcctgtggctgaaagagacttaccccgacgcagtagagtttttaccacttggcgatctcttccctggtgcaaacaaagcgctgaccgaagaaggctttttgcatgttttcccacaaatttacgactgcgaaggcttcttcgttgctcgtctgcgtaaaactcaggcgatccccgccttacccgcccccaaatacaaagtgggcaatttcccgttcagcccggtgaaagatcgcgaagccggacaaattcgtcaggcggctgcaagtgttggcttaaactgggatggaaacctgcgactctggcaacgcgacaaagaactgtggttgttcccggtgggcattgaagccctgatcggtaaagtccgattttctcgcttggggattaaacttgccgaaacgcacaacaaaggttatcgctggcagcatgaagcagttattgcccttgccacccccgacaatgtgaacgcttttgaactgacaccgcaggaagcggaggagtggtatcgcgggcgcgatgtttacccgcaagccgcgccagtggcggatgacgtgttggttactttccagcatcaaccgattggtttagccaaacggattggttcgcgactgaaaaacagctatccgcgtgaactggtgcgcgatgggaaactttttaccggtaacgcctgacagcgcacaaaaaaagcgcactttttgactggcacattcggctgcctcaactaggctgaaaaatggtgcgatcggactggtcgtaccacaaccggcagctaaatggagagcacgaagatgaaaaccagtgtgcgcataggcgcttttgaaatcgacgacggcgaattacacggtgaatcgccgggtgatcgaacattaaccattccttgtaaatctgaccccgatttatgtatgcaactggatgcctgggatgctgaaaccagtatccctgccctgctaaatggcgaacactctgtcctttaccgtacccgttacgatcaacaatctgatgcctggattatgcgtcttgcctgatccaaaaagaacccgtcggcatggcgggttatttgtcctggttattcccccgttgtaaaatctctcctaaacttaacggtacggcaccacacttcggggatgaaatgttcgcgctggtactttttgtttgctacctggatggcggttgtgaagatatcgttgtggatgtctacaacacggaacagcagtgtctttattctatgagcgatcaacggatccgccatggcggttgttttccgattgaggattttatagatggtttctggcgacctgcacaggagtatggtgatttttaattattgcaattgcacaagagtcagttcgcccccaaagacagcacctgtatcaatataatgcaggttgccaatatccacgcgatggcgcaacggtgtatgaccaaaccagaaatgatcagcacctgtaattccctgccctttttggcgttcacctaatcgcgagcggctccacaagacctgatgcaaatcaacgtccttttgccattcataaacatcatctggataatcggcatgagcaataacatgtttgccggtgcgactatgtacttcaagaataaagggcaaatgctgacatttttccagcgccgttttcgcttgtttctgttgattatctgccagcgcaataaaccagtcgccgccattcatcaaccacaaagacatctgctgggatgccagcgcatccatcgccatctgttcatgattgcctcttaccgcacaaacccaatgttgttccagtaactgcagacaacgtaaactttgcggcccacgatcgataacgtctcccactgagataagtaaatctcgccacggatcaaaacgacaatgccataatttgcggcgcaactgctcaagacaaccgtgtatatcgccagaaagccagatatgtcgccattgatgacccgcaattctctgataaacgggcgcaggctgtttcatcaatattttcctcccgcgctaaagatcacataatcttaacaagaatgttaaaaaacgctggactcagacagtagagtgtgtgttatggttgactataaagtcagcgaaggaaatgcttctggcttttaacagataaaaagagaccgaacacgattcctgtattcggtccagggaaatggctcttgggagagagccgtgcgctaaaagttggcattaatgcaggcttagttgccttgccctttaagaatagatgacgacgccaggttttccagtttgcgtgcaaaatggtcaataaaaagcgcggtagtcatcagcttaaatgttaaaaaccgcccgttctggtgaaagaactgaggcggtttttttattggaaatcaaaaggctatttaggtaattaacagagtttttcagctcgttctataaacggtgccagactcattttttcgccgggattgttaggatcatcaatctgaatcaccgaaatcggctgggctttagtcttcccactggcaacttccttttgtgcgatatcgtttaaaggatactgcacgagggtacttgggttgatgacatacaaagcattacccggtcggcaagtcagcatcacctcttcgcgattaaacgcccatttgtctttacccacttcaaaacggctgacggtaatcacctgcggtgccgccagcgccgctgcagaactggtgagtaacagaaacgccagaatactttttttcatcattttcgtaatccatcaaaaaggttcgagagtcgcaagcaggctgatgatcaccagtactaccgcacctatcgcccattcgagtttagtcatccacacaaacaagggtgccgcacgatcttcatcctgcctcatgcgcggtacaagaacataacgattagccagcgcaatgaccaccataatcatcaccaggatggctttgagcaataagagttggccccagtaagtcgtaagtgtggggggaaatccggtaatcaacaatgcattaagcacgccgcttgccagtacgccgatcaccgcaaaatgcccgcaccaggaaaaacgcatcagcgcctgaatagcctggtgtcgccaacggcctttgatgagttgcatacaccagagcaccggcagtaatcccccaaaccacgccgccgcacaaatcaggtgaatcgcgtgattagtctgatggattttcgccgttaccccttcattcagcgtcgcatgccccactcccgccagcagaataaattgcgcggtagtgagcataaacagcaaacgtggcatattccgcggttgcataagggcgacgatcaacgttacgagggcgagaacaatttgccataaccagacgccaccaaactgcgtttgcaaaacagcctgccaaatgtttggcgaaaatacatctgtccatcccgttcccatcaacccgccctgaacggcgagcattgcagtggcactgatcaaactccagacggcagcgtgctgttgtaaacgcagaaaacgcttcgccagcaagcgacgaatcgttaagggggccagccaggcaccgtacattgcgaagccaaaaaccagcatcagcgaggtgaaatggataaatcgcagcgcgatccaggtaaacgccagcatgatttatttcacgctaaaggtgtagtgtcctttcgttttatgcccgtccaccgaaacaacatgccagtcaacggtgtaggttccgggtttcagcgaatcggccagtggaacaatcagttgcttttggtcctgctcatttcgcttcgccggtaatgttttaatattttcgttttttggccccgtgatttttgcaccgctgaatcctgtttcaacaccttccgagaagtttaaagtgattgcctgcggggcagctgtcacttgcgcgtttgccgcaggatactgatgcgttaaatgcgcatgtgcccagacggaaggtgtcaccaacgaagtggtcaggattgccagcgcgtagcgaagggagcgtgcagttgaaaccatattatctattcctttttgtaataacttttttacagagcataaccttgtctaatgtctgagtcgaggatcatcaattccggcttgccatccaggctcactcttagtaacttttgcccgcgaatgatgaggagattaagaatgctgaagaatctggctaaactggatcaaacagaaatggataaagtgaatgtcgatttggcggcggccggggtggcatttaaagaacgctacaatatgccggtgatcgctgaagcggttgaacgtgaacagcctgaacatttgcgcagctggtttcgcgagcggcttattgcccaccgtttggcttcggtcaatctgtcacgtttaccttacgagcccaaacttaaataaaacttatacagagttacactttcttacataacgcctgctaaattatgagtattttctaaaccgcacccataatttgtagtcattttgaaaaggaagtcattatgtcgttctggaaagttgcagcagcgcaatatgagcctcgtaaaacctcactcaccgaacaggtagctcatcatctggagtttgtgagggccgccgccaggcaacaatgtcagctgttagtttttccatcgctttctttactggggtgtgattattcgcgacgtgcccttcctgccccacccgatctctcactgttagacccgctttgttatgccgcaacgacctggcgaatgaccatcattgccggccttcccgttgaatataacgatcgctttattcgtggaattgcggtgttcgcaccgtggcgaaaaacgcctgggatctaccatcagagtcatggtgcatgtctgggccgtcgttccagaaccatcacggtggtcgatgaacaaccgcaaggtatggatatggacccgacctgttcactgtttactacagggcaatgtctgggagaacccgacctgctggcgtcggcccgtcgcttacaatttttttcacatcagtactcgattgccgtgctgatggcaaatgcccgtggtaacagtgcactatgggatgaatatggtcgtctcatcgttcgcgccgatcgtggttcattattgttagtcggtcagcgttcatcacagggttggcaaggcgatatcattccattacgctaggctttttcggcctggagcatgccatgttgcgcattatcgatacagaaacctgcggtttgcagggagggatcgttgagattgcctctgttgatgtcattgacggaaaaatcgtcaaccccatgagccacctggtacgccccgatcgtcctattagtccacaagcgatggcgattcatcgcatcaccgaagccatggtcgccgataaaccgtggattgaagacgtgatcccacactattacggtagtgaatggtatgtcgcgcataacgccagctttgaccgccgcgtactgcctgagatgcccggtgagtggatttgcactatgaaactggcccgtcgtttgtggcctgggatcaagtacagcaatatggcgttatataaaacacgcaagctcaatgtacagacgccgccgggcctgcatcatcaccgcgcgttgtatgactgttatatcaccgccgcgttgcttatcgatattatgaacacctccggctggacggcagaacagatggccgatatcaccggacgtccgtcgttgatgacgaccttcacctttggcaaataccgtggcaaagcggtttccgacgttgccgaacgcgatccgggctatctgcgctggttatttaataacctggacagcatgagcccggagctgcgtttaacactgaaacattatctggaaaatacttagtccgcaggcgtagcgggtaatgttccctgcgccagcgcgaccagaaaagcatattccatcgctacgccttcgtacgatttaaagcgaccagatttaccgccatggcctgagtccatgtcggtacagagcaataaaagatggtcatcggttttcagctcgcgcaatttagcgacccattttgccggttcccaatattgcacctgagaatcgtgcaaaccggtcgttaccagtaaatgcggataagcctgtgcggtgacgttgtcatacgggctgtagcttttcatgtactcgtaatattgcggatcctgcgggttaccccactcttcaaactcaccagtggtaagaggaattgattcatcaagcatcgttgttacaacatcaacaaacggtacctgggcgataacgccgtggaataattccgggcgttgattaattgcaacgcccatcaacatgccccccgcactcccgcccatcgcataacaaagcgaaggagagccatagcccagttttaacaatgcatcgcaggcatcaagataatcattaaacgtatttttcttcttcagaaattttccgtcttcgtaccattgttgccccagctcaccactgccgcgaacatggacaatggcgtagacaaagccacgatctaacaaactcaagcggctaaaactgaaatcggcatcaatacttgcgccgtaagaaccatagccatacaccagcaacgggttgtgtcctttgcgaaaatgtttgcgatggtagaccaacgaaaccggaacttcgacgccatcacgggcgactatccacaggtgttcactgcggtaattcgccgcataaaaaccaggaacttccgtttgttttaatacacgacgctcaccggtatccatatccagttcaaacaaagtgtctggtgtagtcatggaagaataaccataacgcaatcgcgcggtttcaggttctggattgtaggcaatccaggtcacataggccggatcatcaaaggcaataccaatgacttcccgggtcttgcggttaatttggcgcaaactggttaacccgcgctgacgctcttcaaccaccagccagtcggtaaacagcgtaaacccttccagcatgatgttttcgcgtggcggaattaactcttcccactgttgctcatcacgcatacgggtacggtataagccaaagtttttgccgtggcggttggaacgcagataaaaacgatgctggtagtgatcaaggctgtattcgtgatctttgcggcgcggcagaaaaacaaacggctcggcatcggccatttccgcgtccagcaggcgaacttcactggtggtggcgctggccaaatgaatgactacatagtgcttcgaggtcgttttatgcaggctgacgtaataggtatcgtctttttcttcgtagatcagtttatcttgcgatgctggcgtaccgatggcgtgacgccagacctgataaggcagcagcgtcaccggatgcttgcgaacatagtagaaaatccaggagtcatttgcccagacaaagctgggttcaacgttatccagcagttccgggtaccagttaccagtttccagattacgaaaacgaatgccgtactggcgtcgggaaagaaaatcttctgccagcgccataatggtgttatcgggcgtaatcgccattccgcccatcgaataaaactcactatgagctgcgcgcttattggcatcgagcaatgtttcccactcatcccactcttcactgaatgccgattgacgctggtagatagcatattcacagcctggttcataaatatgccgatagcggtagccatttttgatgtagggcgcagaaacttctcgttgcggaatgcggtcgatgatttcctttaagatgcgatcctgcaaggcttgttgtgaggccatcacccgatgaccgtaactattttcttgttgcaggtagtccaggacttctggctgagaacgcgtatcgtcccgcagccagtagtaattatcgatgcgcgtatcgccatgaagcgtcatggcgtggggaatgcgggcggcttttggtagcatgttattgttctttctggttgaaacatcttataagggtggcaaaactcaccggggatgcaagcgaaacaggggagtcattgcttagatgatgacaggtaatggcgcggatatcgaatgttatgcagacagagaaaatcagcctgttcaaatggctgtgcgattctggatagcccgaaatagtcaacttcaggctatccagagagcggaattattccgccaaagtgcgtttttgctgttcgagatcgcgttcaatgccgtcacgaacatcctgggggattttcagcgcgtcacccagtgcattcaggtaactgcgttccataaaatggtcaatatcaatagccgcgcaactcaggaaatagatttccagcgcctcttcttcattgcggaccccggtagccaggcgttgtggatccagcggttgttcgattgcctgctcaatgagtacacgcccctgctcttccacgccggcttcacgcaattgctggtcgattgccgcacgttctttggcatcaatatgaccatcacttttagcggcaaagaccagcgcaaggatcaaacgttctgtacgctcatccagcggcgtactttgcgcgccaaactgcggttcgtcctgatgcgccgcgcgaattttatctttgtatttattccacagcaccgtacccgctaccgctccgccgccaaccagtaacgcgttggtgccatatttcgtaagaagtttacgtgctgatttatttgcgaccagcagcccagccagtccgcctaatgcgcctggcactaacagtttgcccaatccctgatccgcagacgaggaggtagaagaactgctttgcccaagcagggattgcagttgatttaaccagttagccatatttgctcctcaataaccatttttagtgcctgtagcatagcggatgaggatgtcagaaaatgtatatcgagacaaaagatgcgcaaataagcggggcggtaggccgttattcaaagaaattcgcgccaggtaaggtatttactgtatatcaggtgataagggtattttaggtgaaagtagtttgtcgttttgagtggcattgtttgatgctgattgcccgatgcgacgctgttgcgtcttctcaggcctacgattgtggtgcgttctggggcggacaaggcactcgcgccgcatccgccaacggtcaatcgaattatcagaagccattaacgccgctgatattccgccattcccgctttgcagtccacgctgacctggtaatgaatatcggcacttttaccacgcacggttagcggtactgaccatttatcatctttaccctgaatgtcctgcaaactgacccaagccacgggatcggcctgaccgacaattttttgatcatctgcccaacgcgccacgcgattttgttgataatcacgttttacgctcgcggcaattccggcagcatccagaccttcacactttgggaaagtgaccgacttgctggtttcattattggcagcgaaaactgatgcgcaggcagaaaccaacaacagccctaaaaacgcccctctttttttcatgtttttctccatagcacaatgattcaggagaaagcatggtacaaattgtcaggagcgcaagttgcttcaggccgcgtgtgaggcatcttcctcttcggattcagcaccgacgacctgtggggacggtaatttgccggttttcagaatggtgctcagcacatctttttgttctgccagccatagcgaaagggcttcacgttgctcgtcttccatttgcactggagaatttgtcagccaggtgtcaagcagatccgccgtatcaagcattttgtcataagcatcggcttcctttttgctggtaaacgacattttctcttcgccctcacgaatgactacgtatttaacttcaaccgccatttgcagcctctcataataactgtgattttatacagtatatttcttttcggttgagaaatcaacatcagcaataaagacacacgcaaacgttttcgtttatactgcgcgcggaattaatcaggggatattcgttatgacgttattaggcactgcgctgcgtccggcagcaactcgcgtgatgttattaggctccggtgaactgggtaaagaagtggcaatcgagtgtcagcgtctcggcgtagaggtgattgccgtcgatcgctatgccgacgcaccagccatgcatgtcgcgcatcgctcccatgtcattaatatgcttgatggtgatgcattacgccgtgtggttgaactggaaaaaccacattatatcgtgccggagatcgaagctattgccaccgatatgctgatccaacttgaagaggaaggactgaatgttgtcccctgcgctcgcgcaacgaaattaacgatgaatcgcgagggtatccgtcgcctggcggcagaagagctgcagctgcccacttccacttatcgttttgccgatagcgaaagccttttccgcgaggcggttgccgccattggctatccctgcattgtaaaaccggtgatgagctcttccggcaaggggcagacgtttattcgctctgcagagcaacttgctcaggcatgggaatacgctcagcaaggcggtcgcgccggagcgggccgcgtaattgttgaaggcgtcgttaagtttgacttcgaaattaccctgctaaccgtcagcgcggtggatggcgtccatttctgtgcaccagtaggtcatcgccaggaagatggcgactaccgtgaatcttggcaaccacagcaaatgagcccgcttgcccttgaacgtgcgcaggagattgcccgtaaagtggtgctggcactgggcggttatggtctgtttggtgtcgagctgtttgtctgtggtgatgaggtgattttcagtgaggtctcccctcgtccacatgataccgggatggtgacgttaatttctcaagatctctcagagtttgccctgcatgtacgtgccttcctcggacttcctgttggcgggatccgtcagtatggtcctgcagcttctgccgttattctgccacaactgaccagtcagaatgtcacgtttgataatgtgcagaatgccgtaggcgcagatttgcagattcgtttatttggtaagccggaaattgatggcagccgtcgtctgggtgttgcgctggcgaccgctgagagtgttgttgacgccattgaacgcgcgaagcacgccgccggacaggtaaaagtacagggttaaacccggcaaaaaaacgctacaaaaatgcccgatcgtagatcgggcgttttgacttttacagcttagcgccttctacagcttcacgcgccagcttagtaatgcggtcgtaatcgcccgcttccagcgcatctgccggaaccagccaggaaccaccgatgcacagcacgcttttcagcgccaggtagtcacggtagttagccggagaaataccacccgtcgggcagaaacggacctgggagaacggacccgcgatcgcctgcagggctttcacgccgccgttagcttcagccgggaagaatttgaactctttcaaaccgtagtccatacccagcatcagttcggaaacagtgctgatccccggaattagaggaatagtcccttcggtagcagctttcagcagcggctcggtcagacccgggctaattgcgaactgtgcacccgcttcagtgacttctgccagctgctgtggattcagcaccgtaccggcacccacaatcgcttcaggcacttctttggcgatagcacggatagcgtcaactgcacactcggtacgcagagtcacttccagaacgcgcaccccaccagcaaccaacgcttttgccatcggcactgcgtgttccagtttttttaccacgataaccggtacaaccgggccggtggtcaggattgattctgcacttgttttccagtttttcatcagagttttctctcgcctgattacaaatttgtcgtcttaaaaagtgatacaggttgcgccctgttcggcaccggacagtttttcacgcaaggcgctgaataattcacgtcctgtccccacgcgtgacgcgctcaggtcaggaatgtgcggttcgcgagcagccagttccgcttcgtctaccagcagcgtcagttcgcctgtctgtccattcacacgaatgatgtccccgtcgcgcacttttgccagcagcccgccatcgtaggcttctggtgttacgtggatagctgacggcactttacctgaagcgccggagagtcgtccatcggtaactaacgcaattttgaaacaccggtccaataatacaccaagtggcggcatgagtttatgtaattctggcattccgttcgcttttggcccctgatgacggacaacaacgacacaatcgcggtccagcaaacccgcttcaaaggccggcataacgtcatgctggctttcaaaaacaaccgctggcgcttcaatcacctggttctcaaccggcacggcagaggttttcataaccgcacggcccaggttaccgcttaacacttttgtcccaccatgatgagagaaaggttgttcgaaggaagcgatcacattgctgtcgagtgatttttccgccccttcccgccagtccagttcaccattattcagccatggttcaagggtataacgagacagaccaaagcctgccaccgtattgacatcttcatgcagcaggcctgctttgagcagttcacgcaccagaaccggtacgccacctgccgcctggaagtggttaatatcggccggaccgttcgggtagagacgtgccatcagcggtacaacatcagaaaggtcagagaagtcatcccagttaatctgaataccggccgcgcgcgccatcgccaccaggtgcatggtgtggttagtggaaccaccggtcgccagcagtgcaacgataccgttcaccaccactttctcatcgatcatcttaccgatcggcatccattcattaccattaccggtcatgcgtgtaacctgacgcgcagcggcagcggtcaaagcatcgcgcagcggagaatccggatgaacaaaagaagagcctggcaactgcatccccataaattccaccaccatctggttggtgttggcagtaccgtagaaagtacatgttcccggcgcatggtaagacgcggcttctgactccagtaaggccatgcggtccactttaccttcggcataaagctggcgaatacgcactttttctttatttggcaaaccgcttgccatcggtccagacggcacaaacaccgcaggcaaatgaccaaacgacagggctgccatcgtcagacccgggacaatcttgtcgcacacaccgaggaacagagcaccatcaaacatgttatgggacagcccgaccgccgcagacatcgctatcacttcgcggcttagcagcgacaattccattccatcctgcccctgggtgacaccatcacacatcgccggaacaccgcccgcaacctgaccaaccgcattcgcttcatgcagggctttacgaatgatttctggatagtgttcataaggctggtgcgcggagagcatgtcgttataggaggtgatgatggcgatattgttacgcaacatgcttttcaaagaggctttgtcttctggctggcaggcagcgaaaccgtgtgccaggttaccgcatgccaactgcgaacgatgaacggtcgaagttttcgcttgttctatccgggcgagataagcagagcgagtctcgcgcgaacgttcaatgattcgatttgttacgcgtaacaattgtggattcataaaggctcctgaaattgagttgtcagagcaggatgattcacaacgcgtttcattcagaggatttatgactgaaacgcctgtaaccggagctcatagggcaaaaacgtttcagtcagtgtaataaaaaaagcctcgtgggtgaatccgcacgaggcctgaaagtgtaaaaattgttctacaatctgtgcaagatcatgttaccggtaaaataaccataaaggataagcgcagatattactcaaactcattccaggaacgaccatcacgggtaatcatcgccaccgaggcaacgggtccccaggttccggcctgatacggtttcggcgcatcattgtccatcgcccacgcctcagtaatggagtctacccatttccaggcttcttccacttcgtcgcgacgaacaaacagtgcctgaataccacgcatggtttccagcagcagacgttcataggcatccgccagatgcgtctgattaaaggtttctgaatagctcagatccagcttggtgatttgcaggttatgtttgtggtcaaggccaggaactttattcagtacctggatatccacgccttcatcaggttgcagacggatagtcagtttattctgcggcagatcctgccacgactctttaaacagattcagttcaggtgttttgaaatagaccacgacttcagaacatttggtcggcagacgtttaccagtacgcaggtagaatggcacaccggcccagcgccagttatcaatgtcgacgcggatcgccacgaaggtttctgtattgctgctcttgttcgcgccctcttcttccagatatcccggcacttttttgccctgggcgaagcccgcagtatattgcccacgtacggttttttcgcgtacgttggagcggtcgatgcggcgcagggacttcagtactttcactttttcatcgcggatgctgtctgcgctcaggtcagatggcggagacatcgcaatcatgcagagaatttgcagcaggtggttttggatcatatcgcgcatctgaccggctttatcaaaatagccccagcgcccttcgatccccacttcttctgccacggtaatctcaacatgatcaatggtgcgattgtcccagttattcacaaacagggagttagcaaaacgcagcgccaacaggttcagcaccgtttctttaccaagatagtggtcgatacggtaaacctggcactcctcgaagtattcgccaacctgatcattgatttcctgcgaggtcgccagcgacgtccccagcggtttctccatgactacgcgtgccggtttagcattcagttttgcctcgccaagccctttgcaaattgcgccaaaagtgctgggcggcatggcaaagtagttaatggtgatacgatttttttgatccagcatcgcgccgagacggttgaatgcagcagtgtcattgacatcgagattacaaaaatccagacgtgcactcagggtgtcccataaaccttcatcaatggtttctttcatgaaagtttcgagcgcctcgcggacaactttggtatacgccgctttatcccagtcagcacgccctacgccgataatccgggtgtccgggttgagctgaccggctttttccagttgatacagggaaggcagcaatttacgacgcgcaaggtcgcctttcgcgccgaaaatgaccaggtcacaggcctgggctgtttgcgttaccgccatgtcattctccttaagttaactaacccggtacttaagccagggtatacttgtaattttcttacggtgcactgtactgcttttacgagcttgcgaaaactgtaaacgcttatccacccgtgcgattacgggaaaagcgcgcaaagtgcggcaaaactgataaaaaaatcatcgttttccattcggtaaaaatctgacactgatcatgttatgaaaaaaaataacaacttttttatctgcttttgtcattaacacggcacacaggcgtaatatctgacaaaactgcatttcgatttctttcagtgcggaaatcgtcattacccgtgagtctctttacatcatgaatatgctggaaaaaatccagtctcagctggaacatttgagcaaatcagagcgcaaagttgccgaggtcattctggcttcgcccgataacgcgatccattcgagtattgctgctatggcactggaagccaatgttagcgaaccgacggtgaatcgtttctgtcgcagcatggacacgcgcggttttcctgattttaaacttcatctggcacagagtctggcgaatggcactccctatgttaatcgcaacgtcaatgaagatgacagcgttgaatcatacacagggaaaatatttgagtccgcaatggcaacgctcgatcatgtccgtcattcactggataaatctgccatcaaccgcgccgtcgacttgctcactcaggcaaaaaaaatcgcctttttcggattaggctcttcagccgccgttgcccacgatgcgatgaataagttctttcgttttaatgttccggtggtgtactccgatgatatcgtgctgcaacgcatgagttgtatgaattgtagcgacggagacgtggtggtgctgatttctcacactggaagaacaaaaaatctggtcgagctggcgcagctggcacgcgaaaacgacgccatggtgattgccctcacctctgcgggtaccccgctcgcccgggaagcaacgctggcaattaccctcgacgtaccggaagatactgacatttatatgcccatggtttctcgacttgcacagctgaccgtgatagatgtgctggcgacaggatttactttgcgacgcggtgcaaaattcagagataacttgaagcgggtcaaagaagcgctgaaggaatcgcgttttgataagcagttacttaatttaagtgacgatcgctaaaaacgactgtcactgtcctaatcttatacgacatccgaatgagattaatttatcgccatcgcggcgttatttcattcggatttcatgttcaagcaacacctggttgtttcagtcaacggagtattacatgtccagaaggcttcgcagaacaaaaatcgttaccacgttaggcccagcaacagatcgcgataataatcttgaaaaagttatcgcggcgggtgccaacgttgtacgtatgaacttttctcacggctcgcctgaagatcacaaaatgcgcgcggataaagttcgtgagattgccgcaaaactggggcgtcatgtggctattctgggtgacctccaggggcccaaaatccgtgtatccacctttaaagaaggcaaagttttcctcaatattggggataaattcctgctcgacgccaacctgggtaaaggtgaaggcgacaaagaaaaagtcggtatcgactacaaaggcctgcctgctgacgtcgtgcctggtgacatcctgctgctggacgatggtcgcgtccagttaaaagtactggaagttcagggcatgaaagtgttcaccgaagtcaccgtcggtggtcccctctccaacaataaaggtatcaacaaacttggcggcggtttgtcggctgaagcgctgaccgaaaaagacaaagcagacattaagactgcggcgttgattggcgtagattacctggctgtctccttcccacgctgtggcgaagatctgaactatgcccgtcgcctggcacgcgatgcaggatgtgatgcgaaaattgttgccaaggttgaacgtgcggaagccgtttgcagccaggatgcaatggatgacatcatcctcgcctctgacgtggtaatggttgcacgtggcgacctcggtgtggaaattggcgacccggaactggtcggcattcagaaagcgttgatccgtcgtgcgcgtcagctaaaccgagcggtaatcacggcgacccagatgatggagtcaatgattactaacccgatgccgacgcgtgcagaagtcatggacgtagcaaacgccgttctggatggtactgacgctgtgatgctgtctgcagaaactgccgctgggcagtatccgtcagaaaccgttgcagccatggcgcgcgtttgcctgggtgcggaaaaaatcccgagcatcaacgtttctaaacaccgtctggacgttcagttcgacaatgtggaagaagctattgccatgtcagcaatgtacgcagctaaccacctgaaaggcgttacggcgatcatcaccatgaccgaatcgggtcgtaccgcgctgatgacctcccgtatcagctctggtctgccaattttcgccatgtcgcgccatgaacgtacgctgaacctgactgctctctatcgtggcgttacgccggtgcactttgatagcgctaatgacggcgtagcagctgccagcgaagcggttaatctgctgcgcgataaaggttacttgatgtctggtgacctggtgattgtcacccagggcgacgtgatgagtaccgtgggttctactaataccacgcgtattttaacggtagagtaagtacgttgccggatgcggcgaaaacgccacatccggcctacagttcaatgatagttcaacagatttcgaatattctgaagcaaacttgaacttatcatcaggcgaaggcctctcctcgcgagaggcttttttatttgatgggataaagatctttgcgcttatacggctggatttcgcccggtttgcgagttttcagcaattttagtatccaggtgtattgttctggtcgcggaccaacaaaaatctcgacttcttcattcatccgccgcgcaatcgtatgatcatccgcctctaacagatcatccatcggtgggcgcacctgaatcgtcagacgatgcgtcttgccatcataaatcggaaacagcggtacaacgcgcgcacggcacactttcatcaaacgaccaatcgcgggcaacgtcgctttataggtggcaaagaaatccacaaattcgctgtgctctgggccatgatcctgatcgggtaaataatatccccagtacccctgacgtaccgactggatgaatggtttaataccgtcatttctcgcatgcagacgaccgccaaagcgacgacgcaccgtgttccagacataatcaaaaaccgggttgccctgattatggaacatcgctgccattttctgcccttgcgaggccatcagcatggcaggaatatcgacggcccaaccgtgcggcaccagaaagataactttctcgttattacgccgcatctcttcgatgatctccagcccttgccagtcaacgcgcggctgaattttctccggcccgcgtattgccaactcagccatcattgccatcgcttgcggcgcggtggcaaacatctcatcaacaatcgcttcgcgttcagcttcactacgttctggaaagcagagcgacagattgattaacgcacgacggcgtgagctttttcccagtcgtccggcaaaacgtcccagccgtgccagaatgggatcacggaactttggcggcgttaaagcgatacccgccatcgctgctacgcccagccatgctccccagtagcgcgggtggcgaaaggatttatcaaactcaggaatgtattcgctattattttttttcgtttccatgcttttccagtttcggataaggcaaaaatcaatctggtgatagtgtagcggcgcaacttgccccgcaccaaataaaaaaagccggtactgactgcgtaccggctgcgaatggatgttaattaatcaaaccgtagctgcggcacaatctctttggcctgcgccaggaattcgcgacgatcggagccggtcagcccttcggtacgcggcagttttgccgtcagcgggtttacggcctgctggtttatccatacttcatagtgcagatgcggcccggttgaacgtccggtattaccggaaagcgcgatacggtcgccacgtttcaccttctgtcccggtttcaccagaatcttgcgcaagtgcatataacgcgtggtgtagctgcgaccatgacgaatagccacataataacctgctgcgccactgcgtttggcaaccaccacttcaccgtcacccactgaaagcactggcgtaccctgcggcatggcgaaatcaacacctctgtgtggtgcaacgcgaccggtcaccggattagtacgacgcgggttaaagttagacgagatacggaactgtttcgccgtcgggaatcgcaagaatcctttcgccagaccagtaccgttacgatcgtagaatttgccatcttcagcgcggatagcgtaataatctttaccttctgaacgcaaacgtacgcccagcagctggctttgctcacgtttaccatcaagcatttctcgagacattaacaccgcaaattcatcgccttttttcagtttgcggaaatccatttgccactgcatggctttaatcactgcgctcacttcggcgctggttaaaccggcgtttctggcgctggcaacaaagcttcccccgacggtacctttcagcagattgttaacccactctccttgctgcatttcgctggtcattttaaaaccgttagcggcagtacggtcataggttcgggtttcacgacgagacacttcccaggtgaggcgctgcagttcgccgtccgcggttaatgtccaggagagttgttgaccgattttcaggttacgcaattctttgtcggccgcagccagttgggtgatatcacccatatcaataccatactgattgagaatgctgcttagcgtatcgccagtggaaacaacatattcatgcacgcccgcttcaccggcgattttgtcatccagttcgtcctggggaatggcttcatcttcttgtgcagcttgatcaatcggctcactggcttcaggtaagagcgaacgaatttcgttctgttccagctcaatggttttgacaattggcgtggcatcacggtgataaacataaggccgccagacagcgacggccagagtaagaacggtgagcgaccccaacataacgcggtgtggtcgcggtaaattattaaacgccagggcgacagagcgggctatctgttgcacgtaatcacttcctcattaatctcctttcaggcagctcgcatactggttggctaattgactcaggaattctgaatagcttgttttacccagtttgatattcgtccccaggggatccaacgttcccatacgaacggatgtccctcgtgcgacgctctcaacgaccgctggcctgaactgtggctcagcaaaaacgcaggttgctttttgctcaaccaactgtgttcttatttcatgtaaacgctgcgcgccaggttgaatctcagggttaacggtaaaatgaccaagcggtgtcagtccaaactgtttttcgaaatagccgtaagcatcgtgaaaaacgaaataacctttccccttgagcggcgcgagctcgttaccaacctgcgtttcggttgaggctaattgtgcctcaaaatccttcaggttggcgtcaagtttggctcgactttgcggcataagttccactaattttccatggattgcaaccgctgtagcccgcgctatctctggggaaagccaaagatgcatgttgaaatcgccgtgatggtgatcttcgtcacttttttccgcgtggtcgtgatcatcatcatcgccgtgaatacttttcatcagtagcggtttcacatcttcaagctgcgcaatcgttacctgcttcgctcctggtaatttgcttaccggtttttgcataaacgcttccatctccgggccaacccaaacgactaagtccgcgttctgtaagcgttttacatccgatgggcgcagtgaataatcatgttctgaagcgccgtcaggaagtaaaacctctgtttctgttaccccatcagcaatggcagaagcgatgaacccaacgggtttaagcgaagcgacaacggcggcatctgcggcctgtgttgcacctccccagagagcggcggataatgctgcgaaaagaagcgtttttttatgtaacataatgcgaccaatcatcgtaatgaatatgagaagtgtgatattataacatttcatgactactgcaagactaaaattaacatgacaagtctggtttccctggaaaatgtctcggtttcttttggccaacgccgcgtcctctctgatgtgtcgctggaacttaaacctggaaaaattttgactttacttgggccaaatggcgcaggtaagtcgacactggtacgggtagtgctcgggctggtaacacccgatgaaggggttatcaagcgcaacggaaaactgcgcatcggctatgtaccgcagaagctgtatctcgacaccacgttgccactgaccgtaaaccgttttttacgcttacgccctggtacacataaagaagatattttgcctgcactgaaacgtgtccatgccgggcacctgattaacgcaccgatgcaaaagctctctggtggcgaaacgcagcgtgtactgttagcgcgagcattgttaaatcgcccgcaattattagtgctggatgaacccactcaaggcgtggatgtaaatggccaggtggcgttatatgaccttattgaccaactgcgtcgtgaactggattgtggcgttttaatggtttctcacgatctgcatctggtgatggcaaaaaccgatgaagtgctgtgcctgaatcaccacatttgttgttccggcacaccggaagttgtttccctgcatccggagtttatttcaatgtttggtcctcgtggtgctgaacaactgggtatctatcgccatcatcataaccatcgtcacgatttacagggacgaattgttttgcgtcggggaaatgatcgctcatgattgaattattatttcccggttggttagccgggatcatgctcgcctgtgccgcgggtccgctgggttcgtttgtagtctggcgtcgtatgtcttatttcggtgatacgctggctcatgcctcattacttggcgtcgcgtttggtttgttgctggacgtgaatccattctatgcggtgattgccgttacgctgctgctggcgggcggtctggtatggctggagaagcgtccacagctggcgatcgacacgttattagggattatggcgcacagtgccctgtcgctgggcctggtggtcgttagtctgatgtctaatattcgtgttgatttgatggcttacttgttcggtgatttgctggcagtgacgccggaagatctcatctccatcgccattggcgtggtcatcgtggtggctattttgttctggcaatggcgcaatttgctgtcgatgacgattagcccggatctggcgtttgttgatggtgtgaaattacagcgcgtgaaattgttgttgatgctggtgacggcattgacgattggtgtagcgatgaaatttgtcggtgcgttgattattacttcgttgctgattattcctgcagctactgcgcgtcgctttgcccgtacgccggaacagatggctggtgtcgctgttttggtggggatggtggcagtgactggcggtttaaccttttccgcattttacgatacgccggctggtccgtcggtggtgctatgtgcggcactgttatttattctcagtatgatgaaaaagcaggccagctaatctatcgctgaacacatttgtcggatgcggcgcgagcgccttatccgacctacggttcgctatctctggctggccggataagacgcgaatagcgtcgcatcaggcacactgccaatttcggatgcggtgcgagcgaccaatccgacttacggcatttctggcggcgttatgccaaagtgattccacgcccgcgtcgtcgccatacgcccacgcggtgtacgctgcaaaaagccttgctgaatcaaataaggttccagcacatcctcaatggtttcacgttcttcgccaatggctgccgccaggttatccagacctacaggtccaccaaagaacttatcgattaccgccagcaacaatttgcggtccatataatcgaaaccttcagcatcgacattcaacatatccagcgcctgagcagcgatatctgccgagatggtgccatcgtgcttcacttcggcgaaatcacgcactcgacgcagcagacggttggcaatgcgcggcgtaccgcgagcgcgacgagcaacttccagcgcgccgtcatcactcatctcaagccccataaagcgtgcgctgcgactgacgatatattgcagatccggcacctgataaaactccagacgttgcacaataccaaaacggtcgcgcaacggtgatgtcagcgaacctgcgcgcgtggttgcaccaatcagggtaaacggcggcaaatcaattttaatggagcgtgccgccggaccttcaccaatcatgatatccagttggtagtcttccattgccgggtacagcacttcttcaacaactggcgatagacggtggatctcatcaataaacagcacgtcatgcggttcaaggttagtgagcatcgcagccaaatcgcccgccttttccagcaccggaccagaagtcgtgcgtaaattaacgcccatttcattggcgacaatgttggcaagcgtagttttacccaaccccggaggaccaaaaatcaacaaatgatcgagggcatcgccgcgcagtttcgctgctttgatgaaaatctccatctgtgaacgaacctgcggctgaccaacatactcttccagtaatttggggcgaatggcgcgatctgctacatcttccggcaaagtggtaccggcagaaatcagacggtctgcttcaatcatcctttacctcataacgcggcgcgtagggcttcgcgaattaaagtttcactgctggcgtcagggcgagcgattttgctcaccatgcggcttgcttcttgtggtttatagcccagcgccaccagcgcggcaaccgcttcttgttcagcatcgtcggtcgccgggctggcaggagacgtgagtaccaggtcggcggctggcgtaaagagatcgccatgcaaacctttaaatcggtctttcatttcaacaatcaagcgttcggcggtttttttgccaatacccggcagtttcaccagtgcccccacttcttcacgctcaacggcattaacgaactgctgcgctgacattccggagaggatcgccagcgccaacttcgggccgacgccgttggttttgatcaactctttgaacaatgtgcgctcttgtttattgttaaaaccgtacagcagttgcgcgtcttcacgcaccacaaagtgggtgaaaacgatcgcttcctgacccgcttcagggagttcataaaaacaggtcatcggcatatgcacttcatagcctacgccgcccacttcaattaacaccagcgggggttgtttttcaatgatgatgcctctgagtctgcctatcacatgacgctcctgcgtaatgaatcaaagataatgctgtatgataaaaaaatgctggatagatatccagcgaaggatgaagaaaacttgcgaggtgtctcgatgaactgaaaaatggcacagtataatttattctacaggttatattggaagcaaatattttaatattacatattcagtgaagaaatgcgtaataaaaatatacattgcgcctcctgaaaaaataaattttttatgctattacgtatatttgtatctatttcaatggaatgacaacgtgaatattaattaccctgctgaatatgaaattggagatatcgtctttacatgtataggtgctgccttatttggtcaaatatcagctgcatcaaattgctggagtaatcacgtcgggatcattatcggtcataacggtgaagacttcctggttgcagaaagccgggttcccctttcaaccatcaccacgctatctcgttttattaaacgttcgtctaatcaacgctatgctataaagcgattagacgctgggctgacagaacgacaaaaacaacgaattgttgaacaggttccctcccggctacgcaaactttaccacaccggttttaaatacgaatcttcgcgccagttctgttcaaaatttgtttttgatatttataaagaagcgctatgtattccggtgggtgaaatagagacgtttggagaattgttaaatagcaatccgaatgcaaaactcactttctggaaattctggttcctgggttctattccgtgggagcgtaaaaccgtcacgccagccagtttgtggcatcatccgggtttggtgttgattcatgcggagggagtggaaacgcctcagccggaactgaccgaggcggtataacttaacgcagtcgccctctcgccaggttcagccgcgattcgctcatctgcatcgcattctgactaacgtggcagtgggtgatagcaatcgccagcgcatcggcggcatccgcctgtggattagcgggcagtttcagcaaggtgcggaccatatgctgcacctggcttttttcggcactgccaatacctaccaccgtttgctttacctgacgtgccgcgtattcaaatactggcaactcctgattcaccgccgccacaatcgccacgccgcgcgcctggcccagtttcagggctgagtcagcgttctttgccataaagacttgttcaatggcgaaataatcaggctggaactgggtgatgatttccgtcacgcccgcatagatgagtttcagacgagacggtaaatcatccactttggtgcggatgcatccgctacccaggtaggacagttgcctacctacctggcggatgacgccgtagccggtcacgcgcgaacccggatcaatgccgagaataatagccatcacgcgtctccgttttgctgtttagcaggcctcatcagagagtcgctgcgacctcatcagagatttcaccgttatggtaaacttcctgcacgtcgtcgcaatcttccagcatatcgatcagacgcatcagtttcggtgcggtttctgcatccatatcagctttggtagacgggatcatggaaacttccgcgctgtctgctttcagacctgccgcttccagagcgtcgcgcactttacccatttcttcccatgcagtgtagacatcaatcgcgccgtcatcataggtcacaacgtcttcagcacctgcttccagtgctgcttccatgatggtgtcttcatcgcctttctcgaaggagatcacgccttttttgctgaacagataggcaacggaaccatcagtaccgaggttaccgccacatttgctaaatgcatgacgcacttcagcaacggtacggttgcggttgtcagacagacattcaatcatgattgccgtgccgccaggaccgtaaccttcgtagatgatggtttccatgtttgcatcatcatcaccgcccacaccacgtgcaattgcgcggttcagtgtgtcacgggtcatgttgttagacagtgctttatccaccgccgcacgcagacgcgggttagcgtccggatcgccaccgcccagcttagccgcggttaccagctcacgaatgattttagtgaagattttaccgcgcttagcatcctgcgcagctttacgatgtctggtgttggcccatttactatgacctgccataaaaatatctccagatagccctgcctgttcaggcagcgttaattacaaactgttcaatcgcctgccggttgctccaggacttagtgagcgccgccgcagcaggcgcatcaagccacttgtaagccagatgttcagtgaaaacgatctgccgctcgtgcggaagcgcaagacagaaccatgattccgtattacgcgtcacgcccggcgcatagcgatgacgtaaatgtgaaaaaatttcaaactctaccgtgcgctgacagtcaattaaggtcagttgttcagcgacaacatcaatggtgacctcttcctttacttcgcgcatggcagcttgcggcgcggtttcaccctcttccacgctgccggttaccgactgccagaaatcgggatcgtcacgccgctgcaacatcagcacccgtttcgtatcttgtgcgtagatgaccactaagatcgaaacgggacgcttatacactttatccttcacgctgcctcttcgttgactgccttcgctcatcccattcacatagttatctatgctcatgggagttcactcagttgccgcctcgatgcaacgcgaatgatttcgtgtatttgagtcatatcagttattctcagccttcttcacaacctgaatgctcagctcagccagtgcagtcgggttagcaaagctcggtgcttcagtcatcagacacgctgccgccgtggttttcgggaaggcgataacgtcacggatattgtcggtgccggtcagcagcatggtcagacggtcaagaccgaatgccagacctgcgtgcggcggagtaccgtatttcagagcgtcgagcaggaagccgaatttctcgcgctgttcctcttcgttgatacccagaataccaaacaccgtctgctgcatatcaccattatggatacgtactgaaccaccgcccacttcgtaaccattgatgaccatatcgtaagcgttcgccaccgcattttccggtgcagctttcagttctgcagccgtcatatctttcggtgaggtgaacggatggtgcattgccgtcaggccgccttcaccgtcgtcttcaaacatcgggaagtcgataacccacagcggtgcccatttgctttcgtcggtcagaccaaggtctttacccactttcaggcgcagtgcacccatcgcgtcggcaacaattttcttgttgtcggcaccgaagaaaatcatatcgccatcttgcgcggcagtacgatccaggatgtcttcgatgatttctgcattaaggaacttcgctaccgggctgttgataccttccagacctttcgcgcgttcgttaactttgatgtaagccagacctttcgcgccgtagattttaacgaagttaccgtattcgtcgatctgcttacgggtcagcgatgcgccgcccggaacgcgcagagccgctacgcgacctttcggatcgttcgccggacctgcaaatacagcaaactcaacagatttcagcagatcagcaacgtcagtcagttccatcgggttacgcagatccggtttatcagaaccataacggcgttctgcttccgcaaaggtcattaccgggaaatcgcccagatccacacccttcacttccagccacagatgacgcaccagcgcttccatcacttcacgcacttgcggcgcggtcatgaaagaagtttccacatcgatctgagtaaattcaggctgacggtcagcacgcaggtcttcgtcacggaagcatttaacgatctgatagtaacggtcaaaaccggacatcatcagcagctgtttgaacaactgcggggattgcggcagtgcgtagaatttacctttgtgcacacgagaaggcaccaggtagtcacgcgcgccttccggcgtggctttggtcagcatcggagtttcgatgtcgaggaagccgtggtcatccataaaacggcgcaccaggctggtgattttagcgcgggttttcaggcgctgagccatttccggacgacgcaggtcgaggtagcggtatttcagacgcgcttcttcggtgttgacgtggttagagtcaagcggcagaacatctgcgcggttgatgatagtcagcgaggacgccagcacttcgatttctccggtcgccatatcgcggttaatatttttttcgtcacgcgcacgtacggtgcccgtgacctgaatgcagaactcattacgcagttcagaggccagctttaacgcgtccgcacgatccggatcgaaaaatacctgcacgataccttcgcggtcgcgcatatcgatgaagatcaggctaccaagatcacgacgacggttgacccaaccacacagagtcacctgctgccccacgtgggacaaacggagctgtccacaatattctgtacgcatgagatatcccttaacttagctgccggcggatgccccctgctgcgcaggtgaccaagtcgcagcgttagctgtatgtcacaactgaatgaaaaaaggcggctattatactggaaattctgccgcaccgtaagagcctggcccgcgctggaacgcctcgttaccactttatatcgggcctgaaatcagactctacgccagtttgctataaaggtgttgcccgaactcataaaaattaacaaaatttgtcgttccgccatcggctaatcgcattaaggtgtgaggcacgattttgttttttcaggagtcattatgcttgaacttaatgctaaaaccactgcgctggtggtgatcgatttacaagaaggcatcttaccttttgccggtggtccacatactgccgatgaggtagttaatcgcgccgggaagctggcggcgaaatttcgcgccagcggtcagcccgtgtttctggtgcgcgttggctggtctgccgattacgctgaagcattaaaacagccggtcgatgcgccctcaccggctaaagtgttgcccgaaaattggtggcaacatcctgctgcattaggtgcaaccgacagcgatatcgaaatcatcaaacgtcaatggggtgcgttttacggtacggatctggagttgcaattacgccgccgaggtatcgatacaatagtgttatgtgggatctcgaccaatatcggtgttgaatccaccgcccgcaatgcctgggaacttggctttaatctggtgattgccgaagacgcctgtagtgccgccagcgccgagcagcacaataacagtatcaaccatatctacccgcgcatcgcccgtgtgcgtagcgtggaagagatcctcaacgcgttatgatttacatcggtctaccgcaatggtcgcatcctaaatgggtgcggttggggatcaccagccttgaagagtatgcccgccactttaactgcgtggagggcaacaccacgctttacgccctgccgaaacccgaggttgtcctgcgctggcgtgagcagaccacagatgacttccgcttctgttttaagtttccggcgaccatttcgcatcaggcagcattacggcattgcgatgatttagtgactgaatttttgacccgcatgtcaccgttggctccgcgcattgggcaatactggctgcaactgcctgccacattcggcccacgggagctgcctgcgctttggcattttctcgattctcttcctggcgaatttaattatggcgtggaagtccgccatccacagtttttcgccaaaggagaagaggaacaaacgcttaatcgcggtttacatcagcgcggcgttaatcgggtgattttagacagccgcccggttcatgcagcacgtccacacagtgaagctattcgcgacgctcaacgaaaaaaacctaaagttccggtacatgctgtactgacggcgacaaatccgctgatccgttttatcggtagtgatgatatgacgcaaaaccgggaattatttcaggtctggttacaaaaattagcgcagtggcatcagaccactacgccttatctttttttacatacgccagacattgcccaggcaccggaactggtacataccctgtgggaagacttacgtaaaacgcttccagagatcggagcagttccggctattccacagcaatcttctcttttctgaatttgccacctatcatagacaggtgccatcggccattttaaagggagtttgtatggtaagcgcgctgtatgccgttttaagtgcgttgttattaatgaagttctcttttgatgtcgttcgcttgcgtttgcagtaccgcgttgcctatggcgacggcggttttagcgaactgcaaagcgctattcgcattcatggtaacgcggtggaatatattcccatcgcgattgtgctgatgctgtttatggaaatgaatggcgcagaaacctggatggtgcatatttgcggcatcgttttgcttgctggtcgtctgatgcattattacggttttcatcaccgtctgttccgctggcgacgttccggcatgagcgccacctggtgtgcgctgttgctgatggtgctggcgaatctttggtatatgccctgggagttggttttctccctgcgttagcgcacaatacgccactttctttttcccggatttttacgttatgtctcaccgcgacacgctattttctgcccctatcgccagactgggcgactggacctttgatgaacgggtagctgaagtcttcccggatatgatccagcgttccgtacccggctattccaatattatttccatgattggtatgttagccgagcgcttcgttcaacctggtacgcaggtttacgatctgggttgttctctgggcgcggcgacgctctcggtgcgtcgcaacattcatcatgataattgcaaaattattgccatcgacaactccccggcgatgattgaacgctgccgtcgtcatattgacgcctataaagcccctacgccagtagacgtcattgaaggtgatattcgcgatatcgccattgaaaacgcatcgatggtggtgctgaattttaccctgcaattcctggaaccttccgagcgccaggcattactggataaaatttatcaaggactgaacccgggcggcgcgctggtgctttcggaaaaattcagtttcgaagatgccaaagttggtgaactgttgttcaacatgcaccacgactttaaacgtgccaacggttacagcgaactggagatcagccagaagcgcagcatgctggaaaacgtgatgctgaccgattccgtggaaacccataaagcacgcctgcataaagccggttttgagcatagtgagctgtggttccagtgctttaactttggttcactggtggcattaaaagcagaggacgctgcatgatcgactttggtaacttttattctctgattgccaaaaatcatctttcacactggctcgaaacgctgcccgcgcagattgctaactggcagcgcgagcagcagcacgggttgtttaagcagtggtcaaatgcggtggagtttctacctgaaattaaaccgtatcgtcttgatttattgcatagcgttacggcagaaagcgaagagccactgagcgcagggcaaattaaacgcattgaaacgctgatgcgcaacctgatgccgtggcgcaaagggccgttctcactgtatggcgtcaacatcgataccgaatggcgttccgactggaaatgggatcgtgttctgccccatctttctgatttaaccggacgcaccattctggatgtcggctgcggcagcggttatcacatgtggcgcatgattggcgcaggcgcgcacctcgcggtggggatcgaccctacgcaactttttctgtgccagtttgaagcggtgcgtaaactactgggtaatgatcagcgcgcgcatttgttaccgttaggtattgaacaacttccggcactgaaagcctttgataccgtcttttcgatgggcgtgctttaccatcgccgttcaccgctggagcatctctggcagttgaaagatcaactggtcaatgaaggtgaactggtgctggaaacgctggttattgatggtgatgagaacacggtgctggtaccaggcgatcgttacgcgcaaatgcgtaatgtctatttcatcccttccgcgctggcgctgaaaaactggctgaagaagtgtggttttgtagatatccgcattgcagatgtgagcgttaccactacagaagagcaacgacgcaccgaatggatggttactgaatcgctggccgatttcctcgacccacatgatccgagtaagacagttgaaggttatccggcacctaaacgtgcggtgctgattgcgcgcaagccgtaaaggtctggtattactgccggatgcggcgtgaacgccttatccggcctacaaaaccttgctaattcaatatattgcagggactatgtaggcctgataagcatagcgcatcaggcagctttacgtttgcataacctcagcgcccgtttccgggcgctattcacttcttatgcctgaatagctggctgatcaaacgccgttaacttcggcgcattgcccgtatatttttcgatatacaccagcgcagagttaccggcacaggcatttgccagctgcgagctggggatatccgccgttaacacgttcgcactgccgtttttacacaagccattttccagatctggccatgcaccttcatgcacgcataccacgccttttttgatcccgtcagtcaccaccgcgcctgtcagaatctgaccacgtttgttccacacacgcaccagatcaccattcgcaataccaaagcgagcagcatcttcggtgtgaatagtgattggttcacgatctgcaaccgcatattttttacgcagttccgcatagttaagctgactatgtaaacggtgtgccggatgtgcggtcagaagctgcaactgcttctcgtcggcggtacccttccactcatcaggcgcaagccaggttgggtgtgccgggcaatccttatagccaaatttttccagcgttttggagtaaatctcaattttgccgcttggcgtacccagcgcatttttcaccggatcggcgcggaaatcaccataacgaacgtactgttcgttcttctcgctgcggcgcatttcgatcagtttattttgctgccagaaggcattaaacatcggcatagtcacgcgttgcgcacgggcacctttctgagcggcatcatagaaaaatttcagccacgccatttcatctttaccttcggtatagatctcttttccgccaggtttgagtaattccgcaagatcggcaaacacatcaaaatcgtttcgcgcttcaaattgcggagcaacaacctgcttcatcggcacaatatgctggttgctgtaatcaccggtcatcgttaagtcattgcgctcaaacgatgtggtgatcggtaatacgatatctgcatgtttagcagctgcggtccagtagcattcagaaacgacgatcatctccggtttctgccatgctttaatcagacgattagtatcctggtgatgggtaaagttaccgccacccgcccaccagatcattttgatattcggatacgtttgctctttaccgttatgctgatatttgccgccaggattttccagcgcatcgacgatacgggcaacaggaatcgccgtcattccgccatcatcagcggcctcgctggcctgtccggcaatcgccgcagacatttccggcagcacgccgccaacacgtgtcgggttgccaccattggagtaatgataagagaaaccaaaaccgccgcccggtgtaccaatctgccctaacatcgccgccagcgtcaccagcatccagtgtttctgttcaccatattgctggcgctgaattccccagcctgccatcagcattgtgcgattcgccgccatcagttcagcgagtttgactatctgcgcttccggtacgccagtaatttccgccgcccaggccgcgctcttcggagtattatcgctcttacctgtcagatattcttcaaactgcggatacccggtggtgtatttttcaaggaacactttatcgtgtttgccttgtgtcatcagggtatgcgcaatccctaacatcagtgccacgtcggtgcccatattcggcgcgatccaggtggcattatcgccaaagaactcaatggtttcggagcggataggatcaatggcaatcactggtttgccagattttttcagctgatggaagtattccagcccttgctcatcggtactgctccaggcaatttttaaggtattcagcgggttcatcccccacagcaccacaacctggctgttttccagaatcagcggccaggaggtctgctgttcatacacctctacagaaccgaccacatgcggcatgatcacctgtgctgccccggttgaataatcgccgctatgcccggaataaccgcccgcgaggttcatataacgttgcagtaaggtttgcgctttatgcaacacgccagaagagcgccagccgtaagatccggcaaaaatggccgatggtccgttagctttacgaatacgatcgtgttgctcataaatcagttttaatgcttgttcccagctcacctgtacataggtatcttcgcctcgacctttcgccggttgcagtggattatcgagatagctttttctcaccatcggatgctgaatacgcgccgtggtgtgtacctgatccgccgccgtagactgtaaggagttcggtatggttttcgccagcgcgcctgtcgaagaaacaatcttgccgtccttcacttctacgttcatcgctccccagcgtcccgcggtgaggattttaccgcccttctcttctgcccatgcgggtagcggtgctgccgatgtcaccaccagcgccccagcggcaataccgctgtgtttaataaattcacgtcttgttaatgtcataacttcctccctgatcaacgaggatcactgtttctcggtaatatctttggcgttgtactggaagtaccgcgtcaaaatgtccagttcgttttcgctcatgctggttcgcgcacccattcctctggcaatggacggccatgcattgacggtgtaatggtcagcggcaataggcgcatggcaaccagcgcaataggtatcgtcaagtttttcagcgtattgccatagcggtttacggtccgctaatgcgggatcggtaagcgcaccctgtaaagacgcctgacgccattgattgccgtattcgtcagcctgccattccccgtttaccgtgagcgccttgataccttcttcacttaatgtggctagcgccagccgttgacctgccgccaggtagagcgtgttttcactgccctgcatttgataaccctgcaacagaacgatcggctgtttgccactggcatcaacgacggtgagatcggtaccaggattcacggtagccagctcgcctatgcgagaagttttgaaaggataaatatgtgcgccattagtcactgaagtagcggcctgactttccagctcatgcgccgcgttgtcatccatttttatttctggcggaaaatgggcaatgcctttatgacaatcgatacaggtttcaccgcccttttgtgctttgttatgcattttctgcgcagattcactttgcgaggcaatatccatggcatcaaaagaatggcaactacggcacgttgcagagtcagttgcttttaattctttccatactgtttcggccatttcctggcgatgagtttcgaacttatcgtcactgtctattttgccgctaacaaattcatgataaatatctttagatgcttttaatttagcaaataaataatccatccctgactttggaatatggcaatcggcacattccgcacgtatccctttctggttcgaaaagtggacagttccctgatattcctcaaaaggtttactcatcgagtggcaggaaaggcaaaatgctgtatccgacgttttatgtaaggctttttgcgccagcaataacccgccgccaccaaccacaaccgctatcagcaaaaacaataacccaatgcgttttttccctcgcatagattcctctaaataaattccagaacaccgaaatcattgtataattaaatacacaacgaattaaccgcttgcataactcggcacaacactgcctgaaataatcgataaagaatatgatttattacaatgtaatcattaattgctaaggaataacccagttgctatttagaatatatatttatcagttttagcaatttaaatcccataatcaatgtgaatataaaaaatatttttagcacaacgctatgcgcactgtcacccgctcaacagatcacggttatcgttcgttttttatactgctcagggataaaaaaaggcccctgttgaaattgcaggggcctggtacgagcaagcatcatattgggcgacatgatgcaacggtaaaaatcatttggcctgatggcgttcaatgattcctttcatttcagcaaccgccgccccgtctacgacataacgcgaatactcgtccgcgtgtgcatctgatgacatagacaatccttgattacgataacgcatcggtgaggcttgccacgctcccgcggagctatggacttccagcactccggcatcgaggaagtggtgcaggttttctgcacggactcctgctccggccataatgattggagcatcacgatgggcaataagttccataatttttgataaaccttgcagtgcgtctgatttttgccctgatgtcagcacccgggcaatgcccaattccgcaagattattgagtgtatttagagggttagcgcacatatcaaaggcgcgatgaaaagtcactgccagcggaccggcagcagccattattttttccattcgtggcatatcgacattcccgtcaacatcgagaacgcccgtcaccagtccaggaaaacctaattcgcggaccgtgcgcacatcctcaagaatggcggcaaactcaccgtcgctgtagcaaaaatcaccaccgcgtgggcgaattatcggatgcacagggatcgtcacccgctggcgcacggatttcagtacacccaacgacggcgttaagcccccctcttttggggctgcgcataattcaactctgtctgcgccgttttgctgcgccgttagtgcacattccatgctgtaacagcaaatttccagtaatgccatttttactccttaattacgccgactgctcgctggcaacgatctcttcaatggaccacggatgaaacttaatagttgttttgccatcggtgaccgccagcgtcggattcggtaatcgctcatgctcaccttttggcgaactggttttcactgagatccccggtaggctgagtccttcatcagaaagcaatgccagcgcacgggcattcagcgtttctgaatcacccggcagaacgatttcaatatgttcccaaccttcgtgtgggtaacgtttttccccgggccacggtagctccacaatagaaaactgccagtgcgcaacctgtaccggttcatgcaatttaaacagacaaatcggtctgccattgatcatattttctgacaaaagctcgccacactgttcaaacccgcgacgccagcgttcagcagtggcgttttgatggcaacgcaaagaaatgtgatcggcagtcagcggagtgatattcaaccccagacggcgggaaagttcatctaatgcgtgggtaaatcgcggtaaatccgatgcaatatcctgcagctcgtcgatagattgccagttcgccataatcactcttcgtctttcagtaaaagcgttaatttaccctgttgccctgtgccaaccaaccgctgatttcacgccgcttctgatgcaatagtgaaaacggcaatacgccacgcgcacgttgctgacgaaaacagccatttgcagtatactcccgccctaatttctttaactggtgcgggcaatttttgctcgcttcatcaatgtaaggtattccggtgaatattcaggctcttctctcagaaaaagtccgtcaggccatgattgcggcaggcgcgcctgcggattgcgaaccgcaggttcgtcagtcagcaaaagttcagttcggcgactatcaggctaacggcatgatggcagttgctaaaaaactgggtatggcaccgcgacaattagcagagcaggtgctgactcatctggatcttaacggtatcgccagcaaagttgagatcgccggtccaggctttatcaacattttccttgatccggcattcctggctgaacatgttcagcaggcgctggcgtccgatcgtctcggtgttgctacgccagaaaaacagaccattgtggttgactactctgcgccaaacgtggcgaaagagatgcacgtcggtcacctgcgctctaccattattggtgacgcagcagtgcgtactctggagttcctcggtcacaaagtgattcgcgcaaaccacgtcggcgactggggcactcagttcggtatgctgattgcatggctggaaaagcagcagcaggaaaacgccggtgaaatggagctggctgaccttgaaggtttctaccgcgatgcgaaaaagcattacgacgaagatgaagagtttgccgagcgtgcacgtaactacgtggtaaaactgcaaagcggtgacgaatatttccgcgagatgtggcgcaaactggtcgacatcaccatgacgcagaaccagatcacttacgatcgtctcaacgtgacgctgacccgtgatgacgtgatgggcgaaagcctctacaacccaatgctgccaggaattgtggcggatctcaaagccaaaggtctggcagtagaaagcgaaggggcgaccgttgtattccttgatgagtttaaaaacaaggaaggcgaaccgatgggcgtgatcattcagaagaaagatggcggctatctctacaccaccactgatatcgcctgtgcgaaatatcgttatgaaacactgcatgccgatcgcgtgctgtattacatcgactcccgtcagcatcaacacctgatgcaggcatgggcgatcgtccgtaaagcaggctatgtaccggaatccgtaccgctggaacaccacatgttcggcatgatgctgggtaaagacggcaaaccgttcaaaacccgcgcgggtggtacagtgaaactggccgatctgctggatgaagccctggaacgtgcacgccgtctggtggcagaaaagaacccggatatgccagccgacgagctggaaaaactggctaacgcggttggtattggtgcggtgaaatatgcggatctctccaaaaaccgcaccacggactacatcttcgactgggacaacatgctggcgtttgagggtaataccgcgccatacatgcagtatgcttacacgcgtgtattgtccgtgttccgtaaggcagaaattaacgaagagcaactggctgcagctccggtaatcatccgtgaagatcgtgaagcgcaactggcagctcgcctgctgcagtttgaagaaaccctcaccgtggttgcccgtgaaggcacgccgcatgtgatgtgtgcttacctgtacgatctggctggtctgttctctggcttctacgagcactgcccgatcctcagcgcagaaaacgaagaagtgcgtaacagccgtctgaaactggcacaactgacagcgaagacgctaaagctgggtctggatacgctgggtattgagacagtagagcgtatgtaatcgatttttcgtgagagtaaagcctgatcagggttacctgatcaggcttttttattgccatctaaatgtattctgaaaatggacatgccattgttttctcactgttggataagaggccagaagcgtaatatccggccccagggaaacgataacggttgaatttaaggaataccgcagtgtttaaatttcttgtattaacattaggcattatctcttgccaggcttacgcagaagatacggttatagtaaacgaccatgacatttcagccatcaaagattgttggcaaaaaaattcagatgatgatactgacgttaacgtgatcaaatcatgcctgcgacaagaatacaatctcgtcgatgcgcaattaaataaagcctatggtgaagcttatcgttatatagaacaagtgccacgcacaggtgtaaaaaaacctgataccgaacaacttaacttgcttaaaaaatcacagcgagcctggctggattttagggacaaagaatgtgaattaatcctttcaaatgaggacgttcaggatttaagtgacccttattctgaatcagaatggctctcatgtatgatcatacagaccaatacgcgaactcgccagttgcagctataccgtaactctgaagatttttatccaagccctttgacaagaggataattcacatattttcggcatgttttgttgcaatctattcctgataaatgattgcaacaaaacatccagcctttttcactgagttattaaacatactcgcgagcgcgtaattttttttgtccttcagcgataattcacaatcacttcattacgttgtactttcagcgacggaattaaccgcccaccgccaggcacttcccagataaatcgcaacggttctgctgccgctataccggaaaaggccacggtggttccgctctgcccctctaattcgacacaacgagattgcgaacacaagcgaacccgcagtcctgaaggtgtcgggccgataagctgataacgccacgctaccagcgtcatcaatcctgaagcaggttgtcgcgtagaaagaggcgcagacgacatcgactcaccgcgatgatttagcgtaattcctacactacttgcctgccacatcccctccccagcggcttgcaccagcagcggaaacaataatattgctaataaggttctcattatttgccgccaattatcgccgtcatgcggatatgtcggttatcagacagttccagattcgacaggaccactaactgcggcaagctgcggcgcaggaagcgagacaataatggtcgcagcgcgtggttcaccaacaatactggcggcgcacccagcatctcctgacgggatagcgcttcctgagtttgcgccagtaaacgatccgccagccctggctccagtcctcccccgccctgcagcgcctgtagtaacaaacgttccagcggtgtatcgaggccaataacatggacttcatctttgccaggaaaccactgctgggtaatcgcccgtcccaacgccacgcgcacgacggcggttaattcatgtggatcgctttggatgggcgcatgttccgccagcgtttcgagaatggtgcgcatatcgcgaatcggtactttttcatcgaggagattttgcagcactttatgcagtgtggtgagcgtgacgacgccaggaacgagatcttccgtcagctttggcatctcctgggcgacgcgatccaacagctgttgcgcctcctgacgaccaaacagctctgcggcatgctggctaatgaggtggttaagatgcgttgttaccaccgtgctggcctcaaccactgtgtacccctgaatctgcgcctgttcttttagcgcactttcaatccagatagcattcaggccaaatgccggatcgacggtcgcctcaccaggtaacgtcccggcagcggttccagggttaatcgccagccagcgccccggataagcatcaccactgccaatctccacgcctttcatcaaaatgcgatagcgggcaggttgcagatccatattgtcgcgaatgtgcaccactggcggcagaaatcccatctcctgggcaaatttcttgcggatactgcgtatacggcccaacaactcaccatcctgctggaaatcgaccatcgggatcagtcgataacccacttccattcccagagaatcttccagttgtacatcgttccacgtcgcttcgacaacggtattattctctgccatttttaccggtttgggttcggcaggcgctttttgttcgcgtccgcgtatccaccaggccagcccgagcaatccggcagtgaacagcaaaaataccaggttcggcattccaggcaccaggccgagtaaaccgagcacggcggcgcttaacaacataacgcttgggttactgaaaagctgattcaccatctgctcgccaacatcctgatcggtgctgacacgcgtaacgatgacccccgcggcggtagaaatcaccagcgccggaatttgtgccaccagaccgtcgccaatggtcaatagcgtataactttccgccgcgtgtcccatgctcatgccatgttgcagcacgccgaccagcaacccgccgacaacgttaatgaccatgatgaggatcccggcgatggcatcgccgcgaacaaacttacttgccccgtccattgagccgtaaaaattggcttcctgagtcacttcggagcggcgttttttcgcctcatcttcaccaatcaatccggcgttaaggtcggcgtcaatcgccatctgcttacccggcataccatcgagaacaaagcgcgcacccacttctgcgatacgcccggcacctttggtaatgaccataaagttgatgatcacgagaatgacgaacaccacgataccgatagcgaaattgccaccaacgaggaagtgaccgaacgcttcgaccaccttccctgccgccgccgcgccggtatgcccctccatcaaaatgatacgggttgaagccacgttaagtgccagacgcaacaacgtagtaaacaacagaatggtcggaaacgcagcaaactcaagcgtgcgctgggtaaacatcgccaccagcaacaccatgatcgacaaggcaatattgaaggtaaacaacaggtcgagtatgaatgcgggcagtggcagcaccatcatcgacaagatcaacaggatcaaaatcggtccggcaaggatctgccattgtgtcgatttcaggtttgcgggcaggcgcagcatcgcggccagattactcatgggtcggtttctcgttaataaaatccaaggcttccggcaccggaagatgagtaggttgtacagggcgctgtccaccagccagacgccagcgtttcagttgccagacccaggccagcacttccgccaccgcggcgtacagttgacccgggatttgttgaccaatctccgcatgtcgatacagcgctcgcgccagcggcggcgcttcaagcgtcgggacgttattttcagcgccaatttcacgaatgcgcagcgcgaccagccctgcacctttagcgaccactttcggtgcgctcattttgttttcgtcatactgcaacgctaccgaatagtgggtcgggttattgacaatgacatccgctttcggcacatcggccatcatccgacgccgtgcggcagctcgctgcatctgacggatccgtcctttaacatgggggtcgccttcgctttgtttgaactcatcacgaatatcctgccgcgacattcgcagctttttcaggtggctgaagatttggaaaaagacgtcaaatcccaccattggaatgacaccaagcaccaccagcagtgcgcatagccctaccaaatccatcgcattacccatggcggtaatcggagactcggccattaagcgcatcatctgcggccagtgatgccagagaaaaaaccccgtcacgctgccaaccaggatggttttcaaaattgctttaagcaactccgcgccagtctgagccgagaacatccgtttaatgcccggtagcgggttgagtttggaaaacttcggctgcaaggatttgccgctaaataccagccctcccagcatgaccggagaaatgagcgccaccagtaccacgccgctaatcagtggcagcagcgccagcatggcttctctgatcagcagaataatctgcccgaggatcagattcgggtctttgataatactgtgatcaaaatgcagcccagcggagagcatgcccgacaatcgacgggccagcgacacaccgccaaaccagataacactaacgcccaccagcaaaatcagcagtgaggtcagttcacgggaacgcgggatttgcccctcttcccgcgctttttctagtcggtgaggtgtgggggcttctgttttgtcgtcgctctcgtcagacacgtcgccaatcctggaaagagtattaagcgtgaatgatgccagagcgcaaagcgttcaatggtttgagtaaggggcaaaacaggcgggatttagggcttttgctgccacacatcaagcatagtgtgcgtttgtcggatgcggcgtcatcgccttatcagaccgcctgatatgacgtggtcacgccacatcaggcaatacaaatcaaaatccaagactatccaacaaatcgtccacctgatcctgactggctaccacaccggctttgctggtatcgacctgaggtccattaagcaaactctggttttcacgttttggacgcgactcctgttccgggatgttttccaacagcaccatcagcaactggcgttcgatctcctgaatgacatccatcatccgcttaatgacctgcccggtgagatcctgaaaatcctgcgccatcatgatttccagcagttgcgcgttagtaaagctggtatgcgcgggtacatctgccagaaattgtcgtgtatctgttaccagttcacgggcgtcggcaaggtcaatcggatcggcaaaccagtcatcccaacgttgggttaacgcttttgctgatttctccatttgatcctgatgcggttgtgacgcctcaacactgttcagcgcccgctccgcagcctgggcggtcatctgcacaacatagtacaaacgatcgcgcgcatcggggatggcttccgccgcttcggcaatggcctgatccagccccagttcccgcaaactgtcgcgcagcatacgcgtcaggctgccgatgcgcgcaatgatatcgccagctgaatgctcgtcagcaggtttgattgatggttgcatcatagtcgcatcctcacatgcccagtttctcaaagattttgttgagtttttcctccagcgtcgcggcggtaaatggcttcaccacatagccactggcccccgcttgcgccgcagcaatgatgttctctttcttcgcttctgcagtcaccattaacactggcaatgccgacatcgcgccatccgcacgaattgttttcagcaattccaggccatccatattgggcatgttccagtcggagataacaaatccataaccgcctgcctgcaacttattgagagcgtcgacgccatcttccgcttcctcaacattattgaatcccagctctttcagcaggttacgcactatgcgtcgcatagtggaaaagtcatccacaaccaaaaatttaagttctttatccgccatttcacactcctgatttaaatacgtatcgcctgtccggcactaatttttgccaacatttgctggcttacctggctaagatcgaccacttcgcagacaccacccatattgatggcctcgcgcggcatgccgaacaccacgcaacttgcttcgttttgcgcaagggtccatgcccccgcctgacgcatcgccaacattcccgccgcgccgtcgttgcccataccggtcaggatcaccccaaccgcattacgccccgcctgtttggcgacagaatggaacaacacatctaccgaaggccgatgacggttaaccgccgggccatcgtgaattttgatttggtaatttgcgccactacgcgacagctccatatgccgatcgcccggcgcaatataggcatgccccggcaagacacgttctccgtcttcggcttctttaaccccgatctggcaaagcttattaagtctgtcggcaaaagagcgggtgaaaccgggcggcatatgctgggtaattaacagtgccgggctggaaagcggcaacggttgcagtacgtgacgaattgcctcagttccacccgttgaagcaccaatcgcaatcagtttttcagaactcaacaacggccccgccttcagcgttgtcggtgccgacaatggcttatgtgctgcaaggctcgcctttgctgccgtacgcaccttttcagcaatcatttcgttatacgccagcataccttcgcgaatacccagttgcggtttggtgacaaaatctatcgcccccagctccagcgcgcgcagcgtgacttctgaccctttgccggtcagggaagaaaccatcacaacgggcattggacgcaaacgcattaatttttcgaggaaatccagtccgtccatccgcggcatttcaacatccagcgtcagcacatcgggattgaatttcttaatcaagtcacgcgcgaccagcggatcaggcgcggtcgccaccatttccatgtcgctatggctgttgatgatttctgtcatgatctggcgcatcagtgccgaatcatcgacagataacaccctgattttgctcatcgttaatccttacttagcgcatacaccgtctgaccacgcagcgtgaagcggcgctcaaggtggctaaagttttcagagtgacccgcaaacagcaatccgtcgggtttaaggagcggaacaaagcggcgcaaaatctcctgctgggtattttgatcgaagtagatcatgacgttacgacagaagatcgcatcaaacggccccggcacggtgtactgtttcgccagtagattcagcggggcaaaatcaacatagttcgccagctcctgacgcacgcgtaccagcccttcatgcggtcccgtccctcgcatgaaataccgttgcagttgctgcggcgtcaggtttttcaactcttcatggcgataaataccgcttctggctttttccagcacttcggtgtcgatatcactggcaaacactttccagcgtccgggcgcggtgcccaatgtgtcagccagcgtcatcgcaatgctgtacggctcttcgccggtcgaagccgccgcgctccatacgcgatactcgccagaacggcgacgtgcgtgatccgcgagcagagggaaatggtgtgcctcacggaaaaatgccgtcagattcgtggtcagcgaattgataaacgcctgccactcaccgctgtgctgattagattccagcaagttcagataatgaccgaaatccgtcagtcccagcgaacgcaaacgacgaaccagtcggttgtaaaccatgtcgcgtttatggtcagccagaacgatcccggctcgttgatagatcaattgacttatccgccgaaaatgcgcgtcggaaagcgccaggcgctcggtcatctgtaacaataaagacgtttgcccacagggcagagatgaagtcatagcgccttctcaatcacttcaggataccactggcgcaatttgtaactgcgccgactcatgtcgtgctacttcatgttcttcaagggtaaataccgccacacgcgacgaaagatggtcggcctgattcgccagttgttccgttgccaccgccgcttcttctaccagcgaggcgttctgctgagtcacctgatccatctggctgacagcctgtgcaacctgctcaatcccccgctgttgttcttccgacgcagaggcaatttctcccataatgtcgttcacgcgggtcaccgaactgacaatatcgatcatggtcgcggcggcgttattcaccagtttcgaaccctgctggacacgattgactgactcttcgatcagccctttgatctcttttgctgcctgcgcgctacggctggcaagattgcgcacttcacctgccactaccgcaaaaccacgcccctgctctccggcgcgagccgcttccactgccgcattcagggccagaatattggtctggaaagcaattccgtcgataacgctgataatgtcgccaattttttgcgagctggtggcgatctcctgcatggtgtgagtcatggtactgacctgaacaccgcccgcctgcgccgttgtcgcggcattttttgccagttccgacgcctgtcgtgcgttatcagcgttttgccctaccgtggcggttaattgctccatactggcggccgtttgtgccagcgatgccgcctgctgttcggtacgacttgagagatcgttattgcctgcgacaatctccgcgataccaatgtgcatctcctggcttcccttacgcacatcactcaccgtcccacgcaaagcctgctgcatggtcttcaggctggcaaaaatggcggtgatctcattacgaccatataccgcaatcggacgcgccagattacccgcagcaatgctgtcaaaatggctaccgataatggccagtggttgaacaatcatcttgcgcgtccaccacagcgcactgctgatgtagatcgccgcaacaataatcatgctgataaacaccagcgccgaaatctgatagttacgctggctttgcgcactggcggcttccagcacatggttgatctccagctgccaggcctcaaagttaacgtcaaacgcattctgtgattcctgcaccggcgcagtgaggaaatccgaaagttgattactttcaagccaggtcgcctgatgttcgagatcgttgtgccagcgggcaaaacttttctccgtctctttttgcaatgccctgacgtgctcgttgcccgcagtcatcgccataaaacttttaaacagcgtggtggattgcgtcagactggcgcgcgccgtcgtcatcaacgttttaatgtcatccgccggatagctaagtgccgtcagagtgcccgctttgttcagcgcggtactggcctgtaacattaccgcccgagtttgcgctaatgccgcacgttgctgattgctctgctcgacctgattcagtcgttgcaaatcgtcgcgaaatgcccaaaaagacatgccgttactgccaatctgcaagatcccgcagagaatcaaaattaaaaacagcgtggtcgaaattcgaatacgattaaacatcaacgctccccatcaggcggcaatgaccgcgttagtaaatactcgtcaaaatgtttcccagtttggatcttgttcagcaattcgcagtcgtggctgagccggtggttgctcactggcaggacgggatggtgtttgcggtttattggtgagtgggctggctgccagacggaacgcggaaaccgcttgcgttaaacgactcgcctgttcttccagcgcagcggcggcggcagctgattcctgcaccagcgatgcgttctgttgcgtgacgcgatccatttccgaaaccgccaatgcgacttgatcgatgccacggctctgttcatccgatgccgatgcaatctcgcccataatgtcagtcacgcgagtgacagcattgacgatattgttcattgtttccccggcgctttcgaccagcaccgaaccggtatcaacgcgtgagacggagtcttcaatgagggctttgatctcttttgccgcctgggcgctgcgactggcaagattacgcacttcacccgccaccacggcaaaaccacggccctgttcacccgcacgcgcggcttcaaccgcggcattcagcgcgaggatattagtctggaaggcaataccgtcgataacgctgataatgtcggcaattttcttcgaactatcggcgatctcatgcatcgttttcactacgccatccaccactttgccgccgtgctgggcggtgtcggaggcactttgcgccagttgcgaggcctggcgggcgttatcggcgttttgcttcactgtcgcggtgagctgctccatgctggcggcagtttcttccagcgcggatgcctgctgttcagtacgggaggaaagatcggtgttgcccgccgcaatttcacgggtaccggcatagatggcatctgaaccttcgcggacatgagtgacggtgtcagtcaaagagcgttgcatatgtgaaacgctctgcgccaggtcgcccatttcactgcgcccgtcaatggtcagggtattcgccaggttaccaccggcgatttcgcgaatgtgagcaataatttttgccagcggagtaagcaacatacggcgaatgccgtaccacgccaccagcagaatcaataccaccaccagcgcgataaccgccagttgccactgggcaaatcggtaatcatctgcgttgtcagtgacgatatcgcgatacagtttttcactgctgagggcgtactgagcaaacgcttcgcccattgcattttgcattccctgggttggctgagcgaaataagctccagtattgccataatctagataatcaatcagttcagttaacgctgtgtaatagtttttatatttttcatcaatattacgactggtagcgaccatttcaggtaacggtgccatgcttttgaattttttataatgcgtcgctgcctgcgccaatgttttcctggcgctatcgagcaattcaactttggcgttactttgttgattggaggaatccatcatcatccgcaccgctgaacgactcaggttaatgcgcgtttgcagcattaaatcccaggttgacgtcagctcgccctgctgttcccgcaattgattggaaaccacaaagctcttctggctatggtgaagggaagaaaaaaacagactgccggaaataagctgtaacagtgcgaatacccccagcaccattaccaacagcgtgactacgcggatacggttaatcataaggcaccttcctgaaaacaagttgatctcgttatcggcaagaaggggggaaactttattgctgatgccacccgccgcgaaattgaaataaaaaacccgatgcgcagatcatcgggttcatttcaattgaggaaatcgggagaattacgccacttctgacgccgcgctatctaacagcgccatctcttcgctgttcagcagtttttcgatgttcaccagaatcaacatacggtcgcccagtgcgcccagtccagtgagatattctgttgaaagcgtcacggcaaactctggtgccggacgaatttgctccgccgtcaatgaaagcacgtctgaaacgccgtcaaccacgatgccgaccacccgctgtccgagattcaggacgataactaccgtgttgtcgttatagtccacatccacctggctgaacttaattcgtaagtcaacaatcggcacaataacgccgcgcagattcgtgacgcctttgataaacgctggcgtgttcgcaatccgtgttacctgatcgtagccacggatctcctgcactttcaggatatcaataccgtactcttcatcaccaagggtaaataccagaaattcctggcctgacggctcgctggccagctttgttacattcgtcataccggtcatattgttacctttttactcattcaggcggcggtgttcgccatacgttgttcgcggtttatcgcctgcaaggcggagacatcaacaatcagtgccacgctgccgtcgccaagaatggtcgcagcagaaatgccggggactttgcgatagttactttcaaggtttttaactacaacctgatgttgaccaattaattgatccaccagcaaggcgtagcggcgaccgccactttgtaagatcaccacaattccctgggtagcttcggttttcgcgcccgcgacgttgaacactttccacagttcgacgatgggcagatattcaccccgcacttccagcacccgctcgccgccggccagtggatggagatcggcttcacggggttgcagtgattccataacagcattcagcggcagaatgaaaacttcatccgcaacgcgtacggacatgccgtcgaggatggccagcgtcagcggcagtaaaatgcggatcgtagtgccagtaccctgcttcgactggatttcgacatgaccgcccatctcctggatattacgtttaacgacgtccatgccgacgccgcgcccggagacgtcggtgacctgctctgccgtggagaagccaggtgcaaatatcagcatcgcgacttcgtcgtcgctcatgttttcgctgacagtcaaaccttgcgaggccgcttttgccagaattcgctcacggtttagccccgccccatcgtcggtcacttcaatgcaaatgttgccgccctgatgttcggcagacagaattaaatttccgacgctgtttttacctgcggcgagccgtttttctggcagttcaataccgtgatcgaggctattgcgtaccaggtgggtcagcgggtcgataatgcgttctatcaggcttttgtcgagttcagtagaactgcccaccagcgtcagttctacctgcttgccgagttttcccgccagatcacgcaccagccggggatagcgactaaaaacatattccatcggcatcatgcgaatcgacatcactgattcctgcaaatcacgggcgttacgttgtaactgccccatgctggttatcaaatcaccatgattaaccgggtccagttcgctggaacgctgggcaagcatggactgggtgataaccagctcgccgacgaggttaattaattgatcaaccttttctaccgctacacggatgctggtggattcattgctgcgcgtcgttttttcccgctccacgcggccggttggcgcttgttcggctgccagtttaagcactggtggggtggatatttttggcgagacttctactgtttcaaaggtaatctgatcggcttcaatcacaaaacagagtaccgctgtgatgtcatcttcggcgatgtcgcccggtaatattgccgagagcgaatccgcccctttcaccacgtcagttaacgttgtcagatgtcccagttcttcttccagcaggtcgacttccccggccttcaggcgcgaaaggataattcgtcgcggcgactgactgcgactctgctcatcttgcggttcacttttggcaaccacacttaatcgggtcactgcggatggcgtttcgcctttcgcttctaatgccagttgacgcaaggcctggcagatataatcgaagctggcggcatccggctcttgcgactgtttataagcgtcgagctgttcttgcatgatgtccttcgtttccaaaaacagattgataatgtcggtgttgagttgcatctcacctcgtctggcttcatcgagcaggttttccatcagatgcgtggtttcctgcaaaacgctgaagccaaaagttcctgcccctcctttgatcgagtgggcagcccgaaagatggcattcaattgttcggcatctggcgcttccggctgcaaaaccagcagatgctgctccatgtcagccaacagttcgtccgcttcatcaaaaaatgtctgataaaaatcgcttatatccatgctcacgctgtcacctcggttcggctgatggcattgtgggaacactgacctgtggtgcaacctcaggtttttccagggcgcttactggctcattctggctttcggcgttttcatgcaaaatggcctgttcggcttgtttgttcagtaccagcaggctgatgcgacggttgacggcatcatcaggtccgcgatcgcttaagcgcatcgttgccgccatgccgacgacacgtaacactttgccgctatccaaccctccgaccatcagttcgcggcgggatgcattggcccgatcggcagaaagctcccagttgctatatcctttctcaccgctggcgtaggggaaatcatcggtatgacctgaaaggctaatacggttgggaataccgttcagtacaggcgcaatggcacgcagaatgtcgcgcatatagggttcgacatcggcactgccggttctaaacatcgggcgattctggctatcgatgatctgaatacgtagaccttcctggaccagatcgattttgagatggggacgtaacgcccgcagtttcggatcggactctatcaactggtcgagatcaccccgcaatttccgcaatcgactttgctccatgcgttttttcagctcttcgatgttcggctgcttattcacttccccctggctttgggtgtaatcatcaccaccgccgggaattgggctttcactattagaaatgcgatcgccgcccgtaaccgcagtcgccagtggagtccggaagtactccgcaatctgaatcagctcttttgggctggagatggagatcagccacatcaccagaaaaaaggccatcatcgcagtcataaagtcggcataagcaatcttccacgatccatgtgctgccccgtggcttttggctttgcgtcgtttgacgacaataatcggatgcgcttgattcttcatgcttcctcggttgtcgtctgttgttgcggatttttcaccgcacgcacatgctcttccagttcaataaacgacggacgttcgctggaatagagcgttttgcgaccaaactcaacggcgataggcggtgcgtaaccgttcagattagaaagcagagtgactttgacgcactgcatcattttgctggtttcggcgcttttctgacgtaaaacactcgctaatggggaaataaatccgtaagccaataaaatgccgaggaaagtccccaccatcgcatgtgcgataagcgcccccagctcggcggcaggacgatcggctgaacctaacgcgtgaacgacccccattacagccgcgacaataccaaacgccggaagtgagtccccgaccagcgccagactgttcgccgggacttctgcctcgctggcgtgcgtctcaatctcttcatccatcagggcttcgatttcgaaggtgttcatgtgaccgctgataatcaggcgcagataatcgacgataaaatcaagcatgacgctatccgcgagaatgcgtgggtagctggcgaagatctcgctctcacggggattttcaatatcacgttccagcgaaaacatccccatctgccgcgatttcgccatcaaccgataaagcagagccagcagatccatatacattgctttggtgtatttggagcgacgaaacagcaacggcagcgccttcagcgtgcctttaatcgctttgccattattgccgacgataaacgacccaatccctgcaccggcaataatcaccagttcagcgggttgatagagtgctccaaggcttccaccggtcatcaaataaccgccgaaaactgtaccgagaacaaccaggtaacctaataagataagcacgacatcatccttccactgttgaccatgacaggatgttcagtcgtcaggcgttaacgcgcgattggggcaaaaaaaagcagcggtacgtcgttaccgctgctggaatgttgcaccacaccgtatcagttaaacagcctgtactctctgttcatccagcagttgtgggataatatcggcaggattctgggaaagtttacgtctttttactgcccgggatggcggttgacataagctgcaggcaaagctgccaacaggctggtgagcgtgggtaataaaattgccgccgcagcagttgcagctggaaagttgcagtaatccactttcaacaaaccgcaccaatgtccaggcacgggttaatgccagcagtggtccttcttctgcttgtgggcactgttcaaggtataaacggtaggctttgatcaccgcatcgacgccatcacacaaaccggttttcagtaaaaactgccatgcattacagaacatcgaagcatgaacgttttgttcccaggtcataaaccagtcggttgagaatggcagcatgcctttcggcggtgggcttccgcgcagttctttataaagttttatcaggcgtccgcgacttaactgtgtttcgctttccagcatctgcaaacgagcgcccagggtgatcaattccattgccagctgaatatcccgtgcttcctgaacaatgcttttttcactcatgatcaggcccttttcttgcgcagcgcttcttcaggctgattaacatcattcagcaagcgtgttgagagcatgatgccggtatgaatttgctggagatcgtcaacgcgggaatcttgcgtcaactgagtaatcgtctggtggctgtcaaaacgaaagtgacaaaccagttgattggtttctgccagcttaaccatttgcggaagagtcagtgccgctaacgttgtcgccatttcttcatttatgccgagacgaaacatagcggacgctttgtcctgaacaatcatacgctgtgcaagtagtaaatatgacaagttgatgtcataaatgtgtttcagcaactcggaggtatgcatgattcccacccagaataaccaactttatttttatgcggtttcaccgcaccccgtgatgtcgccgggaagcccggcaaaaaataattagcattagaatagttgcgataagctgcaataagcagagccacctttttggtttaataagtccttacaaatagaagggggtctttacacttatctaagatttttcctaaatcgacgcaactgtactcgtcactacacgcacatacaacggaggggggctgcgattttcaataatatgtgatgcagatcacacaaaacactcagttacttaacataaatgcataagccatacttttgttttgggtgtatttcaatctgttaaaaagtttttcgctacgctagcaagcaaaaatgaaacaggaataatcgaaatgggatgttgcgcacagttaaaataacacaccgtaaataatcatctgctataaataatcactttcatgcaataccagataagctatttttaaacagacacttaccgcacaacaaactaattaaatacaaagaaaggcaacaatcaacttaatgttaataaaatgttttgcatatattaaccactgtttaatgcggagaatcagtacactattttcttataattacatttgaaattatatgatcaccgggagtgattgattaattgtctttactaataatcagactaatatttacctgtttgaccgagttgggattgcgtcgtttctccattaggagtaaagctttaatgtcacctgaagttcacagaataaggaacaggttatgagctatagcaatattcttgtcgctgttgcggttacaccggaaagtcagcaactgctggcaaaagcggtatctatcgccaggccagtaaagggacacatcagtttaattactctcgcttccgacccggaaatgtacaatcaattagccgcgccgatgcttgaagatttacgcagcgtgatgcaggaagaaacgcaaagctttcttgataagttaattcaggatgcggggtatcccgttgacaagacgtttattgcctacggtgagttaagcgaacatattctggaagtatgtcacaaacatcatttcgatttggtgatttgcggtaatcacaatcacagtttcttttcgcgagcatcctgctcggcgaaaagagtgattgcctcaagtgaggtcgatgtgctgttagttccacttacgggagattaaccgctcctacgcaagctttggaaaggtagcaactttatcgcgctgctggctttccgcgcttcgcggaactatctgctttaggtcgctaatgaagcactcctgccagtggttaatatcgtttttcacgataacgtccagcatttctgcatgacgggaaatacgttccgccagcgacatagtcaatgcacgatccagcgcagctgcaacttcgtcacgatcgtaggggttaacaattaacgccgacgttaactcgtttgccgctcccgcaaattgcgaaagaacaagaacgcccgggttggctgggtcctgagcagcaacatactcttttgccaccaggttcatcccgtcacgcagtggcgtcactaagcccacgtcagagtagcggaatattttcatcagtaatttacggtcaaaatgctgattcaaataataaagcggcgtccagcctaattgcccgtatttaccattaattcgtccggcttcattttcgagctgatgacgaatatcctgataggcttgcacatcaccacgcgacgttggtgcaatctgggtataacgaattttaccatgatgctgcggatatttttccagcaacgcttcataggcgagaaaacgctccggcaaacctttggaataatccagccgttcgacagaaaagatattttgtacgtttttcagttccgctttgagttgcgccagttttggcggcagtggcccggcagcctgtttggctatttctttcggctcaatgccgatcgggtaaacttccgttcgaaacgctttgccccacgccgtatggctttttgcgctacgcgtcgtgacgcgggtcaggttagaaaggcaatccaggaacgccagacgatcgttttctgtctggaaacccagcaaatcataatcacaaagctgttcaagcaaggtgtcatatgtcggcagcgcgttgaagatttccggtgtcgggaaaggaatatgcaaaaagaaaccaatgcgattattcaccccacgtttgcgtaattcatgcgcaaagggcaacagatgataatcgtggatccagataatgtcatcgtcttgcaacagcggcagtaatttatctgccagcaacgcatttacgcgtagatagccgtcccaggcaggacgctgaaattgcaccagatcgagccgataatgaaaagcgggccagagaacggcattggagaattggttgtagtattcgccaaggtcctgttcgctgaggttaaaagaggcccacgtaatgttaccttttttcaccttttttagcggctgatcctcattccctgtttcaccactccagccaaaccacagtccgcctgcggctttcagtgcccccagtatgccaacggcaaggccaccggcactggcggcgtgctcgtctggtggtgcaatccggttagatactacgactaaacgactcatagtcatcactcctgttattttctcttttttgttgtaatgcggtggttatcatttcaagccagctccagacatccggtacgcccgccagtcgccatgatgcctgagttgcgcctgtgccaatttttactgacattccgcccagccggttaacgactgcgaagccagattcatcggttaaatcatcgcccagaaatacgggcgttcgcccgataaagggagcttcctgcataaaggcagcaatcgcctcacctttactggtacctctcggtttgatctcgacaacacactttccctgctgtaacgccatttgtggccagatctgagtaatacgttgcgctaatgtcattaatgcgtcttcatgctgcggagcctgacgataatgcagtgcaaaagccatccctttcgtctccagctccgcaccgggatactgggcgatgaccgtatgcagttgcacgttaatatcacgtgcaatcgcatccggcagatgaacgatatgcgttttaccattgatgtcacggcgctccgccccatgcacgcccgctaacgggaagcgataaggttttgccagtgcgtccagctccaccattgagcgccctgatatcaatgccaatgcaccatcacttgcgcttgccagtagctgaagtccttgcagaatattgtcaggtacgacgacctgatcgggatgcggtttgatttccgccagcgttccatcaagatcaaaaaaccaggcatatttcgcggatagttcaggggtttcggttaacggttctgtcacccggttctcctccttctcttttcttattgtgttgcgcagaacgcgctttacagacatgtaagtatagacagtgtgacgggggtcgccatttgtaacgaagaacagccaaccgttgtggcggctggctgtggtgggaaaaaacgttaaattgttgtggaaaaaagcatcagacagtgcgtttcgctttttgcttgtaacggtcgaagatcaccgctgccagcaggattaagccgcgaaccacgtattgcgcgaaaggagaaatattaagcaggttcatggcgttttccacggtgcctaaaattaagatacctgccaccacatatgagatttttccgatgccacctttcagagaaacgccacctaaaacgcaggcggagataacaatcagctcataaccaatcgacgtcattggctgcccactggtcatacgtgaagccagaataattccggctatcgctgataccagaccagagagaacaaagataataattttggtgcgaacaaccggtacacccgccagacgcgcagcctcttcgttcccgccaatcgccagggtgttacgcccaaaggtggttttattcagcagcaaaccaaagacaatcagacacgcgacggtaagccagattggcgcaggcagaccgaaccagttagcgtaaccaagggcaaagaagctttcatcttcgataccgaccgctttaccgtctgaaatgatgtacgccagacctcgaacaatctgcatcgttgccagtgttgtgatcagagcatttattttcagtttggcgataacaaagccattgaccaggccacagagaatgccaagcagcaaccccgctgccacgccaatccacaggctttcagtcaggttgataaccaccgccgtggtgacacccgcacaggcaattacggaggcgacagaaaggtcaaagtcaccggaagcaaggcagaacaacatgccacacgccaccatccccgacatggaaattgccaggcccaaccctttcatattaatgaaggtggcaaaatttgggacaaaaatggcacaggcgataaagagcaccgcaaacaccaccagcatgccgtactgatcccagatacgcccaaagctgaatgacgacttaggtgcgccagaacccgatgtagaaacagaagacatcatactctccttactcaggcaactgcctggctgactttaggcatcgcaaggctcagtgcctgacgctcatctgcctgctcgtgtaacaattcaccggcgatttcaccttcgcgcatcaccacaatccggtcggcaacgccgaggacttcaggtaagtcgctggaggcaaacagcaccgccacaccctgcgccgccagcgcataaattacgttatatatttcgtgcttagcgccaacatcaatgccgcgcgtaggttcatccagcaaaatgaccttcatctcttccgataaccagcggcccagaatggctttttgctgatttccgcctgagagattcatgatcagttgctcagcgcccggcgttttgatgttgagcgaacgaatgtggtgatcggcattgttttcttcccaaccgttgttgattacacaaccgccgagcacatgtttacgtctggcactgatgttgatattgtcgcgaacggagtgcacgggaataatgccttccgctttgcgatcttccgggcagagcatcatgcctgcggcaatggcgtggctcggtttacgaatatcgatcggctgttggtcgatataaacctgaccggcggtgatttgcgtcccgccaaacaagcctttcattaattcgctacgccccgcccctaccagaccaaacagcccaacaatttcaccactgcgaaccgccagacttattggcgtacgcacgcctggtgctttcacagcatcaagacgcaggcgctcctcgccataactacgaggttgccagccgtagatatcgccaatgtcgcgcccgaccatcgcctgcaccagcgcgtcgtggtcaacctgctgcatatcggtaaaggttttgacataacgtccatctttaaagacagtgatggcatcgctgagggcaaatatttcttccatacggtgagaaacgtataagatcacccgcccctcttttcgcagttcacgaataacgcggaaaagattgtcgatttcgcgggcagaaagggagctggttggctcatcaaaggcgataattttagcgttacgcgccagcgccttggcgatttcaaccatctgccactgaccaatggagagatatttcagcggcgtgtccgggtcaatatccataccaagatgtttaagttgtaaacccgcctcataattcagcaatgagcgattcacaatgccgcctttatgcggcagctggccgagatagatgttttccgcgacggtcatttccggcacgagatgcagttcctggtaaataatcgccacacccgcgttaagtgctgcggtcgtgtcggaaaaggacatttcctgcccattaatcactacagaacccgtggttggcgcatagttgccgctgaggatttttaagagagttgattttcctgcgccattttcacccatcaacgcatgaacctgaccggcatagcagtcaaaactaatatccgtcagcgccttaacgccgggaaacgttttaccgatgccgcgaaatgagagatacggggtagactgttgcataacgtctccgtgaatcactggtcgttcacaccccctctgcatcatgcagaggggaatttttccggcaaattacttaccgcctaaaccttttttctccagttcttctttaaagttgtcacgcgtgatcagcaccacgtcggtaacttcggtaaattttggcggttcaacgtcttttgctacccagttgtaaagcatttcgctggatttatagccatgtacgtccgggcttggcagcagggaaccgtagaagccggttgcctgtgctttagacagttcgctcaccgcatccacaccgttaatgccaatgccgatgatatcggcagctttaaagccctgaccttccgtcgcgcgtacgccacccagcacggtgctgtcgttcataccgacgatcagccaatgtttaacttccggatgttgaaccagcattgagttggcagcgtcaaatgcccccgggatgtcgttagatttggtaggtacctgataaatttgtttttccgggaatcctgcagctttcagtgcgtccatagaacccgttgtacggcggcgggcggtatccagttcgttggcggtaatcgccatcaccgcgctttctttgacatcccagccacgtttctgcatctctttatacagttcctggccctgacgttcgccaattttagtcgccgccatcatcaccagaggaacggtatccattggcttacctttggcgttaacaaactggtcatccacggcaatgactttcatatcgtagccacgcgctttcgcgacgatggcagagccgagtttggggtccggagtacaaataacgaaaccttttgcgccactggcagccaggctgtcgatcgcgttcaatgttttttcgccatccggcacggcaatcttaataacctcaaaccctaaatccttcccggctttatcggcaaacttccattcggtctggaaccacggctcttccggttgcttcaccagaaaaccgagcttcaggttctccgccatagcggattgtgacataacggctgccagaccaatggctgccagggctttagtaaatttgtgcatggttctctccagctttagtgtcgttttgtgtagggcaaaaacgaatgacattcgttaaattaatcggaaaacaaagcattaccttttaactaaaagataagtgaccgtgttgacatagttttagcgagaaattaattctccataggagagcaatatcacatcgcagaattacagtgagaacgtgcataaatttagcgggaaaagacataagggaaagccaatttgtcagacaaattgtcgaatgcacagcagattaatccataagattagcctggaaatccttgttgtctttggtacccatgcgggatgtcttctttttaaccagtcaataggccgcattacctggcgttgagtttttgaaatggtgtaataaccgcaactcaaagatgtggaaaatgcacgtcattcatttcgtcattaattatcactgtgctcattaattaacagaacacgtataatgagagccatctcgcaaaaatgaaaaaacgttttataaaatcatcacttcatcatgaattcaaattcattgattaatatcaacaagatacaaaaagcactatcattaaaattcattgcagttacattgatttcatcaatgaaatgtaaaaatatataaacttgatgatttaagcattttcttatacccgttcagacgttattcttatttcagatcatcgtcagaattgactccacgatcacatttcggaccggcagaaaggaattattctgcaaacagtaattatggtgttttgatttatcttgcacctctccacttctggatataaggatattaggtatggcaaccgctggaatgcttctcaaactcaactctcaaatgaaccgcgagttttacgcatccaatctctaccttcacctgagtaactggtgttctgaacagagtctgaacggcaccgccactttccttcgcgcccaggcacagagtaatgtgacccaaatgatgcgcatgtttaactttatgaagagtgtcggcgctacccccatcgttaaagccattgatgttcccggtgaaaaactgaactctctggaagaactgttccaaaaaacgatggaagaatacgagcaacgttctagtacgttggcacagttagccgatgaagcgaaagaactgaatgatgattcaaccgtcaatttcctgcgcgatctggaaaaagaacagcagcatgatggtctgttgctgcaaaccattcttgatgaagtgcgcagtgcgaaacttgcgggtatgtgccctgtgcagaccgaccaacatgttctgaatgtcgtgtcacaccagctgcattgatcatcatcggcgctaatgcattgcgccgatgaaggttttgagaaaccgctgcctcatctgtttgaagcagcggtttttttaatgggattcaccctgtggggtaaacttgagttcaataagcgcgatggctttttggattgcccgcatggtgaccgggtctgcggcggcgggatggttagtaaagtcgatattcttcagctgactggacattttttcgcgaacttcaacgggcgcgattacatcgagaacatccagaatttgtttgataaccaactggcaagcaaccacatcagaaaccagttcctgatcggcattcagcggctgggacatcgtaaactcctgatagcattttgaaagccgttatagtagcggcttcacatcttcagcgatagtcacatccaccgtcatcaggacacaaaaaaacctgccggagcaggttttttgttatcggaacatattgcctggcggtacgtctttgaacgtcttgcaatagttattgaacatacttttcaggattttgcgcagtttcatcgcggcactccgaccatttgttatacaggtgttattttctttgcgcttataatatgacaaccatcacaaaaatcaatctttatgtgatacaaatcacataaatacccctttaatgttataaaaatgataatcaaaaaacagcccccctatttctgacacctacagatggcaagaaatagcgcctgccaggcgtcttttccggtcattgtcgcagcgctgtaacgcgtaaaatagtgctttctcttactcttctggctggaccatgagacttctgattctgactctttcattaataacgctggcggggtgtacggttactcgccaggcccatgtgagcgaagttgacgcggcaacaggtattgtacggttggtttataaccaggcttttttgcagcatgcccataccgatcgttatgtcagtcgcgggatcgccgatcgcgcatgccagcaggaaggctatacccacgcgatcccctttggtcagccagtaggcaactgtagcctttttgcgggttccttatgtttgaatacggaattcactttgtcatatcagtgccatcattccgccttccctgtctttctctaaatattttaatcagcaaggggatcttcgctgattaaagaaatagcggtaatgcgttttattcccattcgtatttttaataattgaagtttatattttaccttttgcaaataataaaataacaaattatagtgacgccacagcaacaaatataacctttgtggagcactatcatgctgaaaccagaaatgattgaaaaacttaatgagcagatgaacctggaactgtactcttcactgctttatcagcaaatgagcgcctggtgcagctatcataccttcgaaggtgctgccgcgttcctgcgccgtcacgcccaggaagagatgacgcatatgcaacgtctgtttgattacctgactgataccggcaatttaccgcgtattaataccgttgaatctccgtttgctgaatattcctcacttgatgaattattccaggaaacctataaacacgaacaattaatcacccagaaaattaacgaactggctcatgctgcaatgaccaatcaggactacccaacatttaatttcctgcaatggtatgtttctgagcagcatgaagaagagaaactgttcaaatcgattattgataaattaagcctggcaggcaaaagcggcgaaggtctgtattttatcgacaaagaactctctaccctcgacacacaaaactaatgctctccggcggcaggttttctgccgccgtttcaaatcagtgacggcaaatcttactctgatcggtcgaaaaaccgtcttcagaaggaataaatttgccttttgctgccagaaacgccaccagctctcccgctgtcatcccttctgccgagcaggtgtgaaaacgtgcctgttcaccaaaacgcgctttaatcgcagcttccagactggcatgcgtatattgctcacctgattcaatcatcatatttaacacttcatgaccgtgaatagagtccatcgttcctcctcaaaaaaagcctagcgtagcgattgccgcttatgaagactttgcgccagagcagaactgaatgctttttattgtacatttatatttacaccatatgtaacgtcggtttgacgaagcagccgttatgccttaacctgcgccgcagatatcactcataaagatcgtcaggacagaagaaagcgtgaaaaacagaactctgggaagtgtttttatcgtggcgggaaccacaattggcgcaggcatgctggcaatgccgctggctgcggcaggtgttggttttagcgtcacgttaatcttgttgattgggctttgggcgttgatgtgctacacggcgctattactgctggaggtgtaccagcatgttccggcagataccggtcttggcacgctggcaaaacgctatctgggacgctacggtcagtggctgacgggcttcagtatgatgttcttaatgtatgctctgactgcggcatacatcagcggtgccggtgaattgttggcctccagcatcagcgactggacaggtatttcaatgtcggcaaccgctggcgtgctgttgttcacttttgttgccggtggcgtggtttgtgtcgggacatcgctggtcgatttgtttaaccgttttctgttcagcgccaaaattatttttctggtggtgatgctggtattgctgctaccgcatattcacaaagtgaatcttttaaccctgccgttgcaacaggggctggctctgtcagcaatcccggtgatttttacctcatttggttttcacggtagcgtgccgagtattgtcagctatatggatggcaacgttcgtaagctacgctgggtgtttataaccggtagtgcgatccccctggtggcatatattttctggcaggtggcaacgcttggcagcattgattcaacaacctttatgggattgctggctaatcatgctggattaaacgggctgttacaggcgttacgcgaaatggtggcctctccgcatgttgagctggcagtgcatttatttgctgatttagccctcgccacgtcatttctcggcgttgcgttaggcttatttgattatctggctgatttatttcagcgttcaaataccgttggtggacggttgcaaactggtgcaattacctttctgccgccgttggcgtttgcactgttttatccacgaggatttgtgatggcgctgggttacgccggtgtggcgctggcggtactggcattgattatcccttcgctgttgacctggcaaagcagaaagcacaatcctcaggcgggttaccgggtgaaaggtggtcgtccggcgctggtggtggtgtttctctgtggtattgctgtgattggcgtgcaatttttgattgcggcagggttgttaccagaagtggggtgatcagatagcctcaaattccttattgggtgccagaattaacgctgacacccaatttgacctcttaatgcaggcagcactgcttaaatttcttaccactaccgcacgggcaaggatcgttacgccccggtttctcttctgctttgatcggttgctgaacagctttttcctgcggatgcgccatccagtacgcatgtagatcaagcgccgccagtcgaatggcatctacgctctcttcaaacgcttctggcgacattttctctacccgctcgaagttttcctcagtaccgtgcagcgcaatcgcctccagcgctggttttaacgaatcaggcaacgttgaccagtcagaaagtgccacgccccgcatatagccaaagcaccactcctcaacaatcgtcagctcgctgccatcaacttctcgcaagccgaataacggctcaaactgctccgggaattcgttcagacgctctgcggtatcggccatatgttgaaaagccagattcataaagcgcgtcatctctttctctgacgcccagcgcggcacatagtcagccccaccccacacggcaaccagccactgttccggttcaatctcttgcggagaactcaacaccgccgtcaataaaccgtccagctccgccacatcaaggatggcgtggtcagtgttgtatttggtcagaatatcgtccagccattccaactcactttcgtttaacggtcccgttttcatacgcttttccttgtggatctcaactcgccagcacctatcttacatgccggtccgtatcagagatactttttgagtggctttgccggtgattaaaaattaaggagggtgtaacgacaagttgcaggcacaaaaaaaccacccgaaggtggtttcacgacactgcttattgctttgattttattcttatctttcccatggtacccggagcgggacttgaacccgcacagcgcgaacgccgagggattttaaatcccttgtgtctaccgattccaccatccgggctcgggaagaaagtggaggcgcgttccggagtcgaaccggactagacggatttgcaatccgctacataaccgctttgttaacgcgccaaattcttcaggcctttcagccagacatccgcttgaggccgatgtcttttaaactggagcgggaaacgagactcgaactcgcgaccccgaccttggcaaggtcgtgctctaccaactgagctattcccgcattcatcaagcaatcagttaatcacttgattttattatcgtctggcaatcagtgccgccgttcgatgcgttgcattctacttacctggcgcgatgagtcaacgatatttttcaccacttttgatcgtttgctgaaaattgcgccgaaacgatcactgatcaagcaaatctgcacgcgcagcgctcaaatattgcaacattgaccacagagtcagtaccgcagccacaaagaaaagtgcaataccggcgtactcaacccaaatgttcggacgccacagcagccatgccaacgccaccatctgggcagtggttttcactttcccaatccaggagacagccacgctactgcgtttacccaactccgccatccattcgcgtagcgcagaaataataatttcacgggcgatcatcgttgccgccggtaaggtcacccaccagctgtggtaatgctcggttaccagcaccatggcgatagccacgagaactttatctgcgacagggtcaaggaaagcaccaaaccgggtactctggttccagcggcgtgccagaaaaccatcgaaccagtcagtcaccgccgcgacgcagaaaatgagcgcggcggcaaacggcgaccaggtgacaggcagataaaagaccaatacaaagaatgggataaggatgacacggaacagtgtaagcaacgtagggatattaaattgcataatgacgggtaactatctgttgtcagtaagattacccctatgttgctacagagacatcaatgtttcaacgaccagaagatcttttctgccagaccttgcgaaatacccggcacttttgcaatttcctcgacgctggcgttacgtaaaccttgcaaaccgcccatatatttcaacaacatttgccggcgttttggcccgacgccttcaatggtttccagggaactggtatttttgaccttcgcccgttttttacggtgcccgccaatcgcgtgatcatgtgattcatcgcgaatatgctggataacatgcagcgcgggagaatctggcggcaaactgaatccctcaccttccggctcaaagaacagcgtttccagcccagccttacgatctgctcctttggcaacgccaagtagcagcggatgatttttatcccatgagacatccagttcggcgaagacatttttcgcctgcgcaagctggcctttgccgccgtcgataaggatcacatccgggatcttactgtcgtcaatggctttaccataacgccgacgcagcacctgattcatcgccgcataatcatcgcccggcgtgatgccagtaatgttatagcgccgatactccgcacgcagcgggccgttagcatcaaacaccacacaggaagcgacggtttgttcgcccatggtatggctgatgtcaaagcactccatccgcttcacttctggcaatttcaacacgctggcaagcgcggtcagccgctggtgaacggtagattgctgcgaaagtttgctggttaaggccgtcgccgcattggtgcgcgcgagtttcagataacgcgccctatcgccgcgaggtttggtttgaacattaatcttgcgtcccgccagttctgaaagggaatcggcgagcagcgttttatcgctaagattaaaatcgagcaggatctcacccggtaaggtgcgcatctggctgccttgtaaatagaactgacctacgaaggtttccaccacctcgctcagttccgtaccgcccggcactttcgggaaatagctgcggctgccgagcactttaccctgacgaatgaacaatacgtggacacaagccatgcccgcatcgaacgccacaccaataacgtcaaggtcgtcgccggtattggacacaaactgtttttcggtgacgcgtcgcaccgcctgaatttggtcgcgaatacgtgccgcttcttcaaactccagattctggctggcagtttccatacgactaatgagttgcgtaagcacctgatcatctttaccagacaaaaacaggcgcacatactcgacctgctgagcgtattcttcttcactcaccagtccttcaacgcacggtcccagacagcgccctatctgatattgcagacacggacgcgagcgattgcgataaacactattttcgcactggcgaatggggaaaatcttttgcagtagcgccagagtttcacgtacggcatagccattcgggaacgggccgaaatattcacctttggcatgcttcgcaccacgatgcatcgccagacgcgggtgggtatcgccactcaggaagataaaaggataagatttatcatcgcgtagcaaaacgttgtaacgcggctgatagagtttgatgtagttgtgttccagcaacagcgcttcggtttctgtatgcgtaaccgttacatcaatttgctggatctgggcgaccagcgcttcggttttgcgcgaagcgaggttgctgcggaaatagctggaaagccgttttttcaggtctttcgctttgccgacatagataaccgtaccaccagcatcgtacatgcgataaacgcctggctggctggttacggtttttaaaaacgcttttgcgtcaaactgatcactcactgacttgataatgtctccgcattacacagaccatggcgaattgccaggtgagtcagctcaacatcgccatgaatgtttagtttactgaacatacgatagcggtagctgttcaccgttttcggactgagattgagctgttctgagatctcattgaccttctggcccttggtgatcatcagcataatctgcaattcacgttcagacaaactggcaaatgggctttctgttttttctggttcgatctggcttaacgccatttgttgagcgatgtcagaagcaatgtaacgctgccctgaatagacagaacgaatcgcactcacgacttcctgcggagccgcgcctttgctgaggtagcccgcagcaccggcctgcatgactttcgctggtaaagggttttctgtatggacggtaagcatgatgattttgacatcagctgtggaacgcgcgattttacgcgtcgcctcaagaccgccaatgcccggcatactcatgtccattagcaccacgtcaacggcatttgtccggcaccacttaactgcgtcttcaccgcacgatgcctcaccgacgacttttataccctttatatcttccagaatgcgtcgtatccctgcgcgcaccagttcgtggtcatcaacaagtagaacgttgatcaaaggaatatctccagaaatagggataacgctactgatagttagtcattcgtatattagcggtttttattgcaactttgaaacgttaaaaatggtgggtattcgatttttctctcgtttttgtcaattcgattgtccacagttatggtcacgcccgtcaccaacggcttaccggatcgtttcacagtaagccctacgatgaaatgtgacaaaaattgactttattcagcaaaaatgaaaatcagcccgctgaatatgtaacattaattaacccgaacaatacgggcaaaaaacattcatgataaaaatatttattggtcattatattaacgtattttatagcactgccgatatcgcgctcaaaaaacaaccactgctatttttagcaaagcttatggtatactccgccgccttaacatttttcaccgcaaattttcattgcaacatgacgaggaaaataaatgagtacgcctgatttttctactgccgagaataatcaagaactggcaaatgaagtctcctgcctgaaagcgatgctgacgctgatgctgcaggcgatgggacaagctgacgcgggccgcgtgatgttaaagatggaaaaacagcttgcgctgatcgaagacgaaacccaggctgcagtattttccaaaacggttaagcaaattaaacaagcctaccgtcagtaatataaaaccggctgagagcgtgcctttcagccggtttttgcatctggcacgcagaaagaaaagcgatcaaattaagccagtagcggccgcgtaacaggccacctgggtcttatttggtgcattgatttttttctgcatgtttttctgatggaaattgaccgtattctcagagattgacaaaatcatcgctatctctgctgatgtcttcccttccgccgtccatttcagaatttctttttcgcgcttgctgaaattcatctctggcgtcatcactatttcatcatttaaacgcatcagagccatcagactttcgcgcaccagtaactgcatttttaattgcagttcatcactaagaatgggtatttcgcgcgtgctgcaacgggaaaaggacaaaaagcccagcgcccgatttggcagcattaaatactgagtgacaccgcggcgtaaaccatgtgcgtgcgcggcttcccataatggctgtgcttcgctgaataagtcatcattccacattaaatggccctgactaaagttttcagggttcagcacaggatcaattgcgagaaaattttttgcctgataataactaacccacgactcagggtaattggtgtagaaagccactttaggtcgcgtgaatggtaccgggtggcgaacacataacgaatagtaatcgtactccagctgctgagcctgaagctctatttcatggtagacctcttctgcggcctccatcctctgaaaacgcaacagcatcgtgcgacgccagctgaaaaaatccgtatcctgcatagtaaaccgcaacgcccctgagagtgagtatcatttataatgataattcaaactatcacataaataagatttatatataatttatattattcaggcaatgaattacttttgcaagccatcgcattctcttatgttattaatgagttatgctgatttgttaagcagttttatcacgcttgaaatggcgtcccgccccgacaggtgaatcgtcggggctgattttttcttattattgcagcagaaacttctcgaggaactgtcgggtgcgaggctgctggggatcggcaaataacgcttttgctgccccctgctcgactatccgcccctggtccataaaaatcgcccggtccgcaacatcccgggcaaagctcatttcgtgcgtcacaatcaccatcgtgcgcttttcctgcgccagctggcggattgtgttcaggacttcgcccaccagctctggatccagcgctgacgttggctcgtcaaacaaaatcacctcaggacgcattgccagcgcacgcgcaatcgcaacacgctgctgttgaccgccagacaaacgacgtggatagctggtttctttaccggccagcccaactttcgccagcagctcgcgagcgcgcgccgtggcctcttctttcggttcgcctttgacgatcaccggcccttcaataatgttttccagcaccgtacgatgcggaaacaaattaaagttctggaagacaaacccgacgtgctgacgcaactggcgaatcagcgatttttgctgacttaatgaacgtgcagtatcaatagtgatatcgccaacggtgatcgttcccgcttccggttgttccagcagatttatgctacgtagcaatgtggttttgccggaaccactcggaccgataattgccaccacttcgccaggctttacctcgaggtcgataccgtgcagcaccgtctgaccgtggaattttttcaccaggttcttaacttcaatggcactcatttgggttctctctcctggcgattaagttgattctcaaaatggttctgcaacgtcgataacacagtcgccatgatccagtagatgagcgaagccgccaggtacatggtgaacacctccagcgtgcgcgaggtaatcaactgcgcctgacggaacagctccggcacctggattgtcgcggccagcgacgtatcttttaccagactgataaagctgttcgacagcggcggcaacgccacccgcgccgcctgtggcaaaatcgcgcgacgcatggtctgccacggcgtcataccaatactggcagcggcttcccactgacctttatcaatagaagaaatggcggcgcgcagcgtttcggcggcataggcggcagtgttcagcgacagaccaatcattgctgacggaatgggatctaattcgataccaaactgcggcaggccgtaatagatcataaacagttgtgcgatgagcggcgtaccacgaaaaatagagatataaaaacgcgccagccagcgcacgggccagattggcgacaggcgcatcagcgcgagaataaacccgagtagtaagccaaaaaacatgccgccgatactgagttgcagggtatacccagcccctttcaacaggaacggcaaggaatcaataaccagttgtatactttcttgcatgagcgttcccggagctaaacgtggggatgataggcgaacagcgcaggcgcaccgccggtatgaataaacagaatcggcccttcatctttgaagcgtttctgactgataccgccaatcagccccgccatcgcttttccggtatacacaggatcaagcagaatgccttccagccgcgccagcaatttcactgcttccatgccttcgtcgttcggcacgccgtagccaggtgcaaaatagtcatcccagagtaaaatttccgctgatgcggtcagctccagttctttcgcaatcgcctgttgtaggttaaccactttcggcaactgatcggcaacggaacgcgacacggtcacgccaatcagttcgctttcaggcatcaggtgttccagcccaacagccagtccggcgtgagttccggcactgcccgatgcgactaccaccgacgaaatattaaccgccccttcacactgttgcgcgatttccagcgcactctccacataacctagcgcgccaagagcattagaaccgccaaccggaatgacatacgggcgaaagccttgtgcttcgactcgcgtcgccagctcttccagttgggcattgggatcggtcagtgcatcgcacatttcaatctgggtattgaacagatccagcaacaaacgattgccgttagttaaatagttttctgcggttgtgccaataggattttccagcagcgccacgcagtgcagaccgagtttcgccgcgactgcggcagtctggcgcacatggttagactggatcgcgccggcagtaatcagcgtatcggcaccttcgcgcagggcatctgccgcgagaaattccagcttacgtaatttattgccgcccattgccatgggtgtgacgtcatcccgtttgatgaaaatttcccgtccaagataatcagaaaagcgcggcagatattcgagcggcgttggcgcgccgataaactccaaccgtggaaaacgggttaaattatgcagtggcataacagcctccgatgtgtgttgttgtgattttcttattatgcacgctgaaaacgcgtaaataaaaaaggcgctagtgaaagcgcccttttttgtcattatgctgattatttggtcacatcagcaccaaaccatttttcggaaagagcttgcagagtgccgtctttttgcatttccgcaattgcatcattcaccgctttcagcaggtcttcatttcctttacgcagcgccacgccagactcctgacgggagaatgcttcaccggttactgccagcgtatcgttggttttcttcaccagatccagcgccgccagacgatcaacgaggatcgcatcgatacggcctacgcgcagatcctgatatttggtcgggtcatcatcataggtacgcacatcgacgccctgaacattctgccgcagccactcttcatagttggtgcccagaccgacacccacttttttgcctttcagatcagcagccgttttaatggtgccttcgttaccttttttcaccagcgcctgaataccagaaatggtgtacggcgtagagaaatcgtattttttcttgcgctcatcagaaatggtgacctgattaatcaccacatcaatacgtttagagtccagcgacgccagcataccgtcccatttggtcggttttagtgacgcctcaacgccaagatgttttgccagctgttgggcaaattccacttcaaaaccggttaatttgccgtcatccccctgaaaactgaacggcggataagttccttccagccctaccagtagcgtaccgcgctctttgactttattaagcagaccttcatctgcaaaacttttaacgctcatgcccgcaaccagcgccacggccatcacacccatcaatgcctgacgtcccagatgtgctaatttcatattcaccccgaatgttgttatgtctgtttgcagtgtagagccattgtttgtaaacacaaaaacaactccgctacatcttattcttatttaatatatatcagaagcaggcaggctggaggatttctgcacaagtccggtacacgtttgacgctgatagtgttgatacttccgtaatgcgatgcggtaattgttggtgctggtggtgggcagccacggggcgaggatttcatcaaggaaaccgtcctgcagctgatcgagggaaatattttgctcatgtagatgattccccaaacggcgcaaacgaacgacatattcacgcaccgtacctgggctcatttcagtttgctcaaaaagaaattgcttaaagccgataatatcgaaaaaatcactctgcgttttgcaatgtaaatcaccgcaaaatcggcacaatgccgcccatgactgttgttccacttgccagccattttcatcaagcagcgtgtccaggcgggaaatctcgattttattcactattttgccgtcgcgaactaaggtaatgcgatcgagtaatttacggcaatgcgcgcaatgggtctggctgtgtttaaagtctttaagatagcggcttaatggccgtcttttcaggtgctgcaccatcattaagaactcctggtagtcaaagttaaagtgcggcatttactgacgttataacttacccagtttagtgcgtaaccgtttaatggcctggctgtgtaactgactgacccgcgattccccgacctccagcaccgcgccaatctctttgagattcagctcttcctggtaatagagggttaataccagtttttcgcgctccggcaacgtttcgatagcttccatcacccgctggcgcagattactgtccagcagttgttgtagcgggttttctcgctgatgatcatcagtaaccagttcgatgctatcgccgtgctcttcgcgccactcatcgtaggagaagagctggctgttattggtgtcgagcaacatttggcgataatcggcaatatcgatccctaaacgttccgctacctcagtttccgtggcgttgcggccaagttcctgctccagttgccctattgcctgtgccacttcacgcgcgttgcgtcgcacgctgcgcggcacccagtcacggctgcgaagttcatccagcatagcgccacggatacgctgcactgcgtaagttgtaaatgccgttccttgtagggcgtcatagcgttcgacggcattaagtaacccaatgccgcccgcctgtagcagatcgtcaagttccacgctcgcgggcagtcgaacctgcaggcgcaatgcttcgtgacgcaccagcgggacataacgctgccacagcgagtgtttatccattacaccttcagcggtatagagtgaattcacgataaacagccctgcgttatatgagttatcggcatgattatccgtttctgcagggtttttaatcggacgattagtgggtgaaatgaggggttatttgggggttaccggtaaattccatgcagaaaaaaccccgccggtggcggggaagcacgttgctgacaaattgcgctttatgttgccggatgcggcgtaaacgccttatccggcctacaaaaatgtgcaaattcaataaattgcaattcaccttgtaggcctgataagcgcagcgcatcaggcaatttggcgttgccgtcagtctcagttaatcaggttaggacgattaaccctgcagcagagacagaacctgctgcggtacctggttggcttttgccagcacggagttaccggcctgctggatgatctgcgctttcgacatgttggacacttcggtcgcatagtcggcgtcctgaatacgggactgcgcttcagacaggttggtagtggtgttgttcaggttggcaatggcagaatccagacggttctgaacggcaccgagagaagagcggaatttatcaacagatgcaattgcatcatcaagagccttaagcgggtcagctgttaaattgcttggcgcggttgtagatgcaccaatagataaaacaccagcatcactgatattagcggcattgaaagttgattgattagttgttacatctttggtctgaatgatataagcatcattgccgcttttatctttatacacgacaagcgattggttggctttaagtgcagaagcatccaattttacatcgcggccaacagtagttacttccgtcgctgcagtaggaggagtcccactttcatttgtagagttgaagttaatttcacccttactagtatctacttcggcatcgtagtacttactatttgtagtgtcatttacatagtacttaccgtctttctcaactaattttagggtacctaacgatcctgaagctttatctttaaagtcgccagcacctactgccacttgcttattgatggtggccccatctttaacactggtgcccaagtttgtagcatcaaaactggagaggtttagtgtagatgaatcgatctttttcagatcaatagtgatagtctgtccatcatttgccccaacctgaatgttcattttcccatctttagccaaaacattcacgccgttaaattgagtctgacttgaaacacgatcaatctcttccaggcgagatttgatttcgtcctggatagaagacaggtcagactcagagttagtaccggtggtcgcctgaacagtcagctcacgcacacgctgtaagttgttgttaatttcggacagcgcgccttcggtggtctgcgcaacagaaataccgtcgtaggcgttacgtgcagcctgagtcaggcctttaatgttagaagtaaaacggttagcaatcgcctgacccgcggcgtcatccttcgcgctgttaatacgcaagccagaagacagacgctcgatagaactcgacagcgcagactggttcttgttgatattattttgagtgatcagcgagaggctgttggtattaatgacttgtgccatgattcgttatcctatattgcaagtcgttgattacgttttgggtttccacccgtcggctcaatcgccgtcaaccctgttatcgtctgtcgtaaaacaacctttagaatttttttcacaaacagccattttttgttagtcgacgaaatactcttttctctgccccttattcccgctattaaaaaaaacaattaaacgtaaactttgcgcaattcaggccgataaccccggtattcgttttacgtgtcgaaagataaaaggaaatcgcatggcaagtatttcatcgctgggagtcgggtcaggcctggatttaagttcaatccttgatagcctcaccgccgcgcaaaaagcgacgctaacccctatttcaaatcagcaatcgtcgtttaccgctaaacttagcgcctacggtacgctgaaaagcgcgctgacgactttccagaccgccaatactgcattgtctaaagccgatcttttttccgccaccagcaccaccagcagcaccaccgcgttcagtgccaccaccgcgggtaacgccatcgccgggaaatacaccatcagcgtcacccatctggcgcaggcgcaaaccctgaccacgcgcaccaccagagatgatacaaaaacggcgatcgccaccagcgacagcaaactcaccattcaacaaggcggcgacaaagatccgatttccattgatatcagcgcggctaactcgtctttaagcgggatccgtgatgctatcaacaacgcaaaagcaggcgtaagcgcaagcatcattaacgtgggtaacggtgaatatcgtctgtcagtcacatcaaatgacaccggccttgacaatgcgatgacactctcggtcagcggtgatgatgcgctacaaagttttatgggctatgacgccagtgccagcagcaacggcatggaggtctcggtcgccgcccagaatgcacagctgacggtcaataacgtcgccattgagaacagcagcaacaccatcagcgacgcgctggaaaacatcaccctgaacctgaacgatgtcaccacaggcaaccagacgctgaccatcactcaggacacctccaaagcgcaaacggcgattaaagactgggtgaatgcctataactcgctaatagataccttcagcagcctgaccaaatacaccgccgtagatgcgggagctgatagccagaattctagcaatggcgcactactcggcgactccacgctgcgaacgattcagacgcagttgaaatcgatgctgagtaataccgtcagttcttccaactataaaacgctggcgcagattggtatcacgaccgatcccagcgatggcaaactggaactggatgccgacaaactcaccgctgcattgaaaaaagatgccagcggcgtaggtgcattgattgttggcgatggtaaaaaaaccggcatcacaaccaccatcggcagcaacctgaccagttggctttcgacaacgggcattattaaagccgctaccgatggcgttagtaagacactgaataaattaactaaagactacaacgccgccagcgatcgcattgatgcgcaggtcgcgcgctacaaagaacaatttacccaactggacgttttaatgacctcgttaaacagcaccagcagctacttaacgcagcagttcgaaaacaacagtaattccaagtaatcattattcatcgggagacaggtcatgtacgcggcaaaaggcacccaggcctatgcacaaattggcgtcgaaagcgccgtaatgagcgccagccagcagcagctggtcaccatgctatttgatggagtgctgagcgcactggttagagcgcgcctgtttatgcaggacaacaatcagcaaggcaaaggcgtctctttgtcaaaagcgatcaacatcattgagaacggacttcgggtgagtcttgatgaagagagcaaagacgaattaacccaaaacttgattgctctttatagctatatggtcaggcgcttgctgcaagccaatttacgcaacgatgtctccgcagtcgaagaagtggaagcattaatgcgtaatattgccgatgcctggaaagagtcgttactctccccttctttgattcaggacccagtctgatgaaccatgcaccgcatttgtatttcgcctggcaacaactcgtcgaaaaaagccagctcatgttacgcctggcaacggaagaacaatgggacgaactcatcgccagcgaaatggcgtatgtgaatgcggtgcaggagatagcacacctgactgaagaggttgccccgtccaccacgatgcaggagcagctccgcccgatgctgcgcctgattctcgacaacgaaagcaaggtaaagcagttattacagattcgtatggatgaactggcgaaactggtcggtcagtcatcggtgcaaaaatcggtgttaagtgcctatggcgatcagggcggctttgtgctggctccgcaagataacttctcgtgaatcttaacgagctaatggttcgcgaataatccgattacggctacgcttctaatgttccccttgaatggagtcgaagaatgcgtaatcccacgctgttacaatgttttcactggtattacccggaaggcggtaagctctggcctgaactggccgagcgcgccgacggttttaatgatattggtatcaatatggtctggttgccgcccgcctataaaggcgcatcgggcgggtattcggtcggctacgactcctatgatttatttgatttaggtgagtttgatcagaaaggcagcatccctactaaatatggcgataaagcacaactgctggccgccattgatgctctgaaacgtaatgacattgcggtgctgttggacgtggtagtcaaccacaaaatgggcgcggatgaaaaagaagctattcgcgtgcagcgtgtaaatgctgacgaccgtacgcaaattgatgaagaaatcattgagtgcgaaggctggacgcgttacaccttccccgcccgtgccgggcaatactcacagtttatctgggatttcaaatgttttagcggtatcgaccatatcgaaaaccctgatgaagatggcatatttaaaattgttaacgactacaccggcgaaggctggaacgatcaggttgatgatgaattaggtaatttcgattatctgatgggcgagaatatcgattttcgcaatcatgccgtgacggaagagattaaatactgggcgcgctgggtgatggaacaaacgcaatgcgacggttttcgtcttgatgcggtcaaacatattccggcgtggttttataaagagtggatcgaacacgtacaggaagttgcgccaaagccgctgtttattgtggcggagtattggtcgcatgaagtcgataaactgcaaacgtatattgatcaagtggaaggcaaaaccatgctgttcgatgcgccgctgcagatgaaattccatgaagcatcgcgcatggggcgcgactacgacatgacgcagattttcacgggtacattagtggaagccgatcctttccacgccgtgacgctcgttgccaatcacgacacccaaccattgcaagccctcgaagcaccggtcgaaccgtggtttaaaccgctggcgtatgctctaattttgttgcgggaaaatggcgttccttcggtgttctatccggacctctacggtgcgcattacgaagatgtcggtggtgacgggcaaacctatccgatagatatgccaataatcgaacagcttgatgagttaattctcgcccgtcagcgtttcgcccacggtgtacagacattatttttcgaccatccgaactgcattgcctttagccgcagtggcactgacgaatatcccggctgcgtggtggtcatgtcgaacggggatgatggcgaaaaaaccattcatctgggagagaattacggcaataaaacctggcgtgattttctggggaatcggcaagagagcgtagtgaccgacgaaaacggcgaagcgaccttcttttgcaacggcggcagcgtcagcgtgtgggttatcgaagaggtgatttaaattcatccccggcggcaagccggggagatttcattacggcagtggcgtcggtaacggcgctttatccagcgcggcggcacactctgccgtcgggcgatccacacgctccatcgtcataccatcgtactcaatggtgttaccgtcacgctcaacctcgtacagctcacgttttacggtaacgttagtgagatcatcagacatcaatgtcaacttgcccggcacggcaatcacccgctgccactgacggcaatccagggtatcgccctctttagtgacaatcaggctgcctatcgcttccggactgaccagcgcacgttgcggccctttggtctgccagtagcccgccagccagtccggcgcgggggttttcacgacattgttatagttttcgacttcggcacagcccgccagcaacatgagcgcgcttgcaattgcgagttttttcatcattcgtcctgcatgagaagaaaagaggattgtggcattaaagccctgatgtcgccagcctttccaggttcagagagaaatttgatctaactattatttttgtgaattattaccccgaaaataaatttgcatgatgtatgattcgcgattcttgtttcaaaccttctgagttcagaggctacattcatgtcatggcagcaattcaaacacgcctggttgattaaattctgggcacccatccctgcggtcatcgcggcgggtattctctccacttactattttggcattactggcaccttttgggctgtcacgggtgaatttacccgttggggcggtcagctcctgcagctgtttggcgtccatgctgaagagtggggttattttaaaattatccatctggaaggatcgccattaacccgcatcgacgggatgatgatcctcggcatgtttggcggctgctttgccgcagcgctgtgggccaacaatgtcaaactgcgcatgccgcgcagccgtatccgcattatgcaggccattattggcggcattatcgccggttttggcgcgcgtctggcaatgggctgtaacctggcggcgttctttaccggcattcctcagttctcgctgcatgcctggttctttgccatcgccactgccattggttcatggtttggcgcgcgctttaccctgctgcccatcttccgtattcccgtgaaaatgcagaaagtttctgccgcctcaccgctgacgcaaaaaccggatcaggcgcggcgtcgttttcgtctcgggatgctggtctttttcggcatgctgggctgggcgctgctcacggcgatgaaccaacccaaactggggctggcaatgctgtttggcgtcggctttggtttactgattgaacgtgcgcaaatctgctttacttcagcgttccgcgatatgtggatcaccggacgtacccatatggcgaaagcaatcattattggtatggcggtgagtgccatcgggatcttcagttacgtacagttaggcgttgaacccaaaatcatgtgggcgggaccaaacgcggtaattggtggtttactgtttggttttggcatcgtgctggcaggcggctgcgaaaccggctggatgtaccgcgcggtagaaggccaggtgcactactggtgggtcggtctgggcaacgtgatcggctcaacgattctggcgtattactgggatgatttcgctccggcgctggccaccgactgggacaaaatcaacctgctgaaaacctttggcccgatgggtggcctgctggtgacatatttgctgttgtttactgcgctgatgttgattatcggctgggaaaaacgcttcttccgccgtgcggcaccgcagactgctaaggagatcgcatgaaaaatatcgttcctgattaccgccttgatatggtgggtgaaccctgcccttatccggcagtcgcaactcttgaggcgatgccgcagttaaaaaaaggggaaatcctggaagtggtgagcgactgtccacagtcgatcaataatattccactggatgcgcgtaatcacggctatacggtgctggatattcagcaagacgggccgaccattcgttatttaattcagaagtaatccctcattcccgctgtggcccacagcgggaacatcgttgcctctgacacatagattttacccgccccctctcctattcttttcagtatgatctcaggaggtttctatgtgtggacgctttgcccaatcccaaacgcgtgaagattaccttgcgcttctcgcggaagatattgaacgcgatattccctacgatcccgaacccattggcagatacaacgtcgcgccgggaaccaaagttcttctgctcagtgaacgtgatgaacaccttcatctggatccggttttctggggatatgctcccggatggtgggataaaccgccgctgattaacgcccgcgtagaaactgcggccaccagtcgtatgtttaaaccgctctggcaacatggtcgggcaatctgttttgccgatggctggtttgagtggaaaaaagaaggcgacaaaaaacagccttattttatctatcgcgctgatggacaacctgtttttatggccgcgataggtagcacaccgtttgagcgcggtgacaaagccgaaggatttttaattgtcactgcagcagcagaccagggtctggtagatattcatgaccgccgcccgctggttctgtcgccagaagctgcacaggaatggatgcggcaagagattggcggtaaagaagcatcagaaattgctaccaacggctgtgtgccagcaaaccagttcacctggcacccggtatcgcgcgcggtaggtaatgtcaaaaaccagggcgcggagttaattcaacctgtttgttgacatcctccacgccctgaaggacgaggatccctgctacgttcaggctgtcgcctgaatcatttcggtgggttcctgcttcaacgggcggcctgactgcaccatccctccacaggcaagaacggcgtgccccgccgctaaaatgttacgagcgccatttacatcggcgttcgctgtatatccacatacctggcatctgaatttactttgtgacaggcggttttctttcgctgtatgaccacagcacgcgcaacgctggcttgtgtacgctggcggaacagcaagcacctgaccgccacgccagagctgcttgtactcaagctggcggcgcatttcataccagccctgatccagtatcgaacggtttaaacctgattttgcccggacattgcgccccggctggctgaccgtacccgctgctgactttgacatgttgctgaccttcaaatcctcaatgactatcattgcgtggtttttgctgacggtcgttgtgactttgtgaaggtagtccctgcggatatttgcgatacaggaatgcagtcgctgaatttgaccttgcggcttaactgtcgctgaagtctcgccagcttcttctggtttttctgaaaactgtttacaggctcaaagactgtgccatctgacagcgtggcgagtttagccacgccagcatccagcccgaccattgatgctgaagggtgaaccggagttgatacttcactttctgtctgaatactgatgtaccacttaccgcaggactggctgacagtgacatttttcacaacacccgtgacctgagggctgttccggtagcgcatccagcccagtttcggcagaaaaatacggctgttttcctgatcgagcttaacgccctgcgggtagcggaatacatcattctgtccccgctttttgaatcggggaaaagcagcccgcttccggaagaagtttttgtaagcccgctcaaggtctttcagtgactgttgcaatggctgtgacggggcatctttaagccattgcgtttcagtggcatttttccactcaaccagccaggaagccattttcccgtaagggatgtatttattaccgacctcatgattctcattctgacgtgccagagcacgattgaaaacgaaacgacatgcgcctgcgaagcgcctcatttcacgctcctgttgaccaccgggtcttaactggaatttaaatgcttgtagtcgtttcacaggccaaatgatactttggtctgtgaaaaaagaaaccgatatccggcgtggaaggcattgtgttttcctgatgcatgttcacctggtctttgtcaccagataccgacgtcagatttttgaccatgacgcgacagaaaaactacgcacttacttttcaaatgtatgtgcttattttgaagctgaactggttgaaatggatggcgaaccagatcacgtccatttgttaattaactatcctcccaaactggcgatatccagtctggtaaacagcctcaaaggcgtatcgggtaggtgactgcgacgagatcgaccagatattgcagtcaggtattactacaaaggcgttttgtggagtcctggctattttgccagtagctgcggaggtgcgccaatatccgtcatccgccaatacattgaacaacagcaaacacctggttaggtggaaaaccacgccttatatccctgccctgaaggacggggttttacggcgcaccggataagcctggagattatctacaccagcatggacatcattgtactatgccccgtacatgccccatcacatcctcaacatcaaagtattagagccttgcaaaccattatgcgtctcagtttgtctcatctatcttacgcaaaaaaaaatagaactaatatcaagcggcgctatattgcgtattaaataaaaccacctcaattacattaataaatctaaacaaacatcatgcaaataatttccatggttatttctaggctatttaaattaaataaataaattatgagtcaatcataaataacaacctttaatataatttaactaccaaatttatattcgttcacaaaatagtcatgcattgtgtgcaatagaaacagttcagataaagatagggatctacttcacaatttaaatgagaaactaaaacttacatcttgaaataatctcattgattggatgaatatttgcagtgcagtgacatcatttttaaataatagttcaaataaaagggctcacgatgaaaaaattaacagtggcaatttctgctgtagctgcatcttaacgtataaactagatttaataacaacgaactagatttaataacaacgatatccgtacctatccggatatctaatgtcataagcatccctttaattatcccctcaacctcttgtaactttcccactcttgaactccacatagtccaaacgccggatgcaaaaaaatcacacgtgcatttctgaaattgtgatggaggaagatagtatcaattatatgtgcttataaacgtccccgattagcgcagaagtcaccggattgttcaggctccaataggttgagtatgccgtatttattttccaaaataaaaatcgatgctgttgctccttcataaaatacttttactctctggacgcttttcttagctctcttggtgttatcttaaaacgattatggaacctttcagtaaaacgagaaggacacttgtaaccattttccctggcaatctcgctgatgggttttactgtcgtttgtatagcagacaacgcattatttaacctcacgtcgtccaatatactttgaaaacttactccctcgcttgccagacggcgatgcaatgtggaaacagaaatgtagagatatctcgctaccttgtttgctgtccattttgttccaggttcggatagcattaggttataacaacgacttattaatgattgtttactatctgataaaagtaaacaattaacatgatgtgctcctaatgaaagtagaacgcccattgctaagtgttcctgaatttgcgttgagaagcctcgggaaatagatgtttttagttgctcccaacaatatattaactcgggattctgaggtaagcagaaacctgtcgtgttacgaatttgatcggttatcgcataaagattttggaacttttcaattagatcaatgggataataaagcatttctgcaagataaagacctgcttctgggtaattcgcaatataaaattcatatccacagggaaataatattatctgattattatcaacagttagactatgcgtctcccaattgataactttttttccctgacggatacgacataaagctggcataagaggcttaaccctgtgaatctcatgatgtttatgcatccgtatttcttcaatctttaggttagtcctatcttttgccagcatactcttatcctactttacctcataaacgggtattatctcagcggttgcaattttattggcattaagcatataaccaactaacgctccgctggaattagaatccacaggaatcttatcagtttttagagcccatattttaaactggtaatgatggggtttatctcctttgggaggacatgctccaccaaatcccgcatagccaaaatcatttcggccttggacagcaccagtcggaagttttgtaccatcacgtcttcctgcatcagcgggcaaatatgttaccgttgctggaatattagcaacagtccagtgccaccatccgctgcctgtaggcgcatctggatcatacacagttacggcaaagcttttggtgccttctggagcaccagaccaggttaatgagggcgatgtattacccccctcacacccaaatccagaaaatacatgagacgttgtaagttgctctcctgtttttatttcattactagtgacctgaaatgctgcggcctgcgcagaaaatgttatgaatgccaatacacttgaaacgataagttttttcataaaaacctctttgttgtgacctatcgttattttatttgatgtgcattgatctcattatgcaaaaaggcgcaatgatcgcgcaaatgcaatcataattataaagttgccccgaacattagccataatatgcacaaatcagattcctgttatctcaaggatgattattttttaatgcggtgcgcttcgtgacaacaagttaatgactaacacaccggcacaaatcaacatcatgcctatgatggctggcaagtccagtcgttggccaaaaaatccccaggaaagcaaactaatcagaacgataccgactcctgaccagatagcataagcaatccctgtaggtatataagccagtgtctgagctaataaccaaaatgatgcacaatagcaaataattgtgccaacagagggccataaccgtgtaaacccctctgaaaacttcattaaggttgtaccaatgacctctgcaagtattgcgccaccaagataaatataagggttcatagcatattctttcctgttcatactggagagaattgtactacagtttgaacacaactcaccgttttcatcctggtgtatgtgtatccagggggctctagcgtggcaagagataaaggcaggaacaataatgatcagaaggaaccccaggctaacaaaagagttcactcttcctatgagcaaagcgaagacaaaacatgttatcgcgtttacggatcgtggatggcagaaaactttcaggatcaggtatccattttaaaccagaaattgagtgagtttgccccatccatgccccacgctgtgggatcggatataataaacaagcatagtcaacaggttacaaaacctacacctgcatggacatcacttcctgatacgccgccaccagcttattacgcacctgaatccccatttgcatagaaactgaggctttttgcatatcggtcatcacatcgtttagcgccacgccgggctcaccgagggtgaatttttctgcctgcgtgcgggcggctgtttgtgtatcgcttatgcgatcgagcgcggcgtgcagctgcccggcaaaactaattgtcggttgcggcagtgattcctgcgcacgcgcactcatcgccgtggtctgtaactggctgataaccccttcaatcccctgtatcgctgacattttcatctcccggataatttctggtagcaaagcctaccagtaagtcaataagacaaaggcgctaaatagcaacaaaaaaacgggtttattggcggatagaaaaaaacgaaagcacaaataatgggagcgtcaatttttcgagtttgctgacccgggagtgagtcttgttccactttgccaataacgccgtccataatcagccacgaggtgcgcgatgaatgcgactgcagcccagacaaaatctcttgagtggcttaatcgcctgcgtgcgaatccgaaaattccattgattgttaccggttccgcggcagtggcggtcatggtcgcactgatcctgtgggcgaaaacccccgactaccgtacattattcagcaatctttccgatcaggatggtggcgcaattgtcagccaactgacgcaaatgaatattccttaccgcttcagcgaagccagcggcgctattgaggttccggcagataaagttcacgaactgcgcctgcgcctggcgcaacaaggtttgcccaaaggcggcgcggtcggtttcgaactgctcgatcaggaaaagtttggtatcagccagttcagcgaacaggtgaattatcagcgggcgctggaaggcgagctttctcgtaccatcgaaactataggcccggtaaaaggggcgcgcgtacatctggcaatgccgaaaccgtctttattcgtccgtgaacaaaaatccccttctgcatcggtgacggtaaatctgttacccggccgcgcactcgatgaagggcaaattagcgctattgtacatctggtttccagcgcggttgctggtctgccgccaggaaacgtcacgctggtggatcagggcgggcatctgttaacccagtccaataccagcgggcgcgatcttaatgacgctcagttgaaatatgccagcgatgtcgaaggccgtattcagcggcgtattgaagcgatcctgtcgcctattgttggtaacggtaatattcacgcccaggtcacggcgcaactggacttcgccagtaaagaacaaacggaagaacagtatcgccctaacggtgatgaatctcatgcggcgcttcgttcacgccagcttaatgagagcgagcaaagcggttccggttatccgggcggcgtaccgggggcgttgtcgaatcaaccggcacctgcgaataacgcaccaatcagcacgcctccggcaaatcaaaataaccgccagcagcaggcgagcaccaccagcaatagtgggccgcgtagcacacagcggaatgaaaccagtaactacgaagtcgatcgcaccattcgtcataccaaaatgaacgtgggcgatgtgcaacgtctgtcagtcgcggtagtggtgaattacaaaaccttgccagacggtaaaccattgcctctcagcaacgaacagatgaagcaaattgaagatctgacccgcgaggcgatgggcttttctgaaaaacgcggtgactcgctcaatgtcgttaactcgccgttcaatagcagtgacgaaagcggcggagaactgccgttctggcaacagcaagcgtttatcgatcagttgctggctgccggtcgctggttgctggtactgctggtggcgtggctgctgtggcggaaagcggtacgcccgcagttaacacgtcgcgccgaggcgatgaaagctgtacagcaacaggcgcaggcccgtgaggaagtggaagatgcggtggaagtccgcctgagcaaagacgaacaactccaacaacgacgcgctaaccaacgtctgggggcagaagtcatgagccagcgtatccgtgaaatgtctgataacgatccgcgcgtggtggcgctggtcattcgccagtggataaataacgatcatgagtaacctgacaggcaccgataaaagcgtcatcctgctgatgaccattggcgaagaccgggcggcagaggtgttcaagcacctctcccagcgcgaagtgcaaaccctgagcgctgcaatggcgaacgtcacgcagatctccaacaagcagctaaccgatgtgctggcggagtttgagcaagaagctgaacagtttgccgcactgaatatcaacgccaacgattatctgcgttcggtattggtcaaagctctgggtgaggaacgtgccgccagcctgctggaagatattctcgaaactcgcgataccgccagcggtattgaaacgctcaactttatggagccgcagagtgccgccgatctgattcgcgatgagcatccgcaaattatcgccaccattctggtgcatctgaagcgcgcccaggccgccgatattctggcgttgttcgatgaacgtctgcgccacgacgtgatgttgcgtatcgccacctttggcggcgtgcagccagccgcgctggcggaactgaccgaagtactgaatggcttgctcgacggtcagaatctcaagcgcagcaaaatgggcggcgtgagaacggcagccgaaattatcaacctgatgaaaactcagcaggaagaagccgttattaccgccgtgcgcgaattcgacggcgagctggcgcaaaaaattatcgacgagatgttcctgttcgaaaatctggtggatgtcgacgatcgcagcattcagcgtctgttgcaggaagtggattccgaatcgctgttgatcgcgctgaaaggggccgagcagccactgcgcgagaaattcctgcgcaatatgtcgcagcgtgccgccgatattctgcgcgacgatctcgccaaccgtggtccggtgcgtctgtcgcaggtggaaaacgaacagaaagcgattctgctgattgtgcgccgccttgccgaaactggcgagatggtaattggcagcggcgaggatacctatgtctgataatctgccgtggaaaacctggacgccggacgatctcgcgccaccacaggcagagtttgtgcccatggtcgagccggaagaaaccatcattgaagaggccgaacccagccttgagcagcaactggcgcaactgcaaatgcaggcccatgagcaaggttatcaggcggggattgccgaaggtcgccagcaaggtcatgagcagggctatcaggaaggactggcccaggggctggagcaaggtctggcagaggcgaagtctcaacaagcgccaattcatgcccggatgcagcaactggtcagcgaatttcaaactacccttgatgcgcttgatagtgtgattgcttcgcgcctgatgcagatggcgctggaggcggcacgtcaggtgatcggtcagacgccaacagtggataactcggcactgatcaaacagatccaacagttgttgcagcaagaaccgttattcagcggtaaaccacagctgcgcgtgcacccggatgatctgcaacgtgtggatgatatgctcggcgcaaccttaagtttgcatggctggcgcttgcggggcgatcccacactccatcctggcggctgtaaagtctccgccgatgaaggcgatctcgacgccagtgtcgccactcgctggcaagaactctgccgtctggcagcaccaggagtggtgtaatgaccacgcgcctgactcgctggctaaccacgctggataactttgaagccaaaatggcgcagttgcctgcggtacgtcgctacgggcgattaacccgcgctaccgggctggtgctggaagccaccggattacaattgccgctcggcgcaacctgtgtcattgagcgccagaacggcagcgaaacgcacgaagtagaaagcgaagtcgttggctttaacggtcaacggctgtttttaatgccgctggaggaagtcgaaggtgtcctgcccggcgcgcgtgtttatgccaaaaacatttcggcagaagggctgcaaagcggcaagcagttgccgctcggtccggcgttattaggtcgtgttctggacggcagcggtaaaccgctcgatggcctcccctcccccgatacgacggaaaccggtgcgctgattaccccaccatttaacccgttgcaacgtacaccgattgaacatgtgctggacaccggcgtgcgcccaatcaatgccctgcttaccgttgggcgtgggcagcgtatggggctgtttgccgggtccggcgttggtaaaagtgtgctgctggggatgatggcccgttacacccgcgccgatgtcattgtcgtgggtttgattggtgaacgtgggcgcgaagtaaaagattttattgagaatatcctcggtgccgagggacgtgcacgctccgtggtgattgccgctccggcggatgtctctccgcttctgcgaatgcaaggtgccgcctatgccacgcgaattgccgaagattttcgcgatcgtggtcagcatgtgttgctgattatggactccctcacccgctacgcgatggcccagcgtgaaattgcgctggcgattggcgaaccccccgccaccaaaggttatccaccgtcggtgtttgccaaattaccggcactggtcgagcgtgccggaaatggcattagcggcggcggctcgattaccgcgttttataccgtgctcactgagggcgatgaccagcaggaccccattgccgactccgcgcgggcaatcctcgacggtcacattgtgctctctcgccgactggcggaagccgggcactatccggctatcgatattgaagcgtcgatcagccgcgcaatgacggcgttgatcagtgagcaacattacgcgcgagtgcgcaccttcaaacagctgttatcgagttttcagcgtaaccgcgacctggttagcgtcggcgcgtatgccaaaggcagcgatccgatgctcgacaaagccatcgccctgtggccgcagctggagggctatttgcaacaaggcatttttgaacgcgcggactgggaagcgtctctccaggggctggagcgtattttcccgacagtgtcataacccaggagataacggcagatggcagaacatggcgcgctggcgaccctgaaagatctggcagaaaaagaggtagaggatgccgcgcgcctgctgggtgaaatgcgtcgcggatgtcagcaggcggaagaacagctcaaaatgctgatcgattatcagaatgaatatcgcaataacctcaacagcgatatgagtgccgggatgaccagcaaccgctggatcaactatcagcagtttatccagacgttggaaaaagccattactcagcatcgccagcaacttaatcagtggacgcagaaagttgacattgccctgaacagctggcgagaaaagaaacaacgtttgcaggcctggcagacactgcaggaacggcaatccacggcggcactgcttgcagaaaaccgcctcgatcagaaaaagatggatgagttcgcccagcgcgccgccatgaggaaacctgaatgattcgcttagcgcccttgattaccgccgacgttgacaccaccacattgcctggcggcaaagccagcgatgctgcacaagattttctcgcgttgttgagcgaagcattagcaggcgagacaactaccgacaaagcggccccccagttgctggtggcaacagataagcccacgacaaaaggcgagccgctggtcagcgagattcttgccgatgcgcaacaagcggatttactgatccctgtggatgaaacaccgcctgtcatcaacgacgaacaatccacatcaacaccattaaccaccgctcaaacgatgacgttggctgcggtggctggcaacaatacggcaaaagacgaaaaagcggatgatctgaatgaagacgtcaccgcaagcctgagcgccctttttgcgatgttgccgggttttgacaatacgcccaaagtgactgatgtgccgtcaaccgtgttaccggcagagaaaccaacgctcttcacaaaactgacttctgcgcaactcacaacagcacagcctgatgatgcccccggcacgccagctcagccattaacaccgctggtagcagaagcccagagtaaagcggaagtcatcagcacaccgtcaccggtgaccgctgccgccagcccgctaattactccacaccagacacagccactgcccaccgtcgccgcgcctgttttgagtgcaccgctgggttctcacgaatggcaacaatcattaagccagcatatttcgctgttcacccgccaggggcaacaaagtgcagagttgcgtctgcgcccgcaggatttaggtgaagtgcaaatctccctcaaagtggatgataaccaggcgcaaatccagatggtttcaccgcatcagcatgtacgcgccgcgctggaagcagcgcttccggtactgcgaacgcagctggccgaaagtggcattcagttagggcaaagcaacatcagtggcgaaagctttagtggtcagcagcaggccgcttcccaacaacagcaaagccaacgcacagtaaaccatgaacctctggcgggggaagacgacgatacgcttccggttcccgtctctttacaagggcgtgtaacaggcaacagcggcgttgatattttcgcctaacgtcagaggtagcaccgtaatccgcgtcttttccccgctttgttgcgctcaagacgcaggataattagccgataagcagtagcgacacaggaagaccgcaacacatgactgattacgcgataagcaagaaaagcaagcgatcgctttggatcccgattctggtattcattaccctcgcggcctgtgccagcgcaggttacagctactggcattcgcatcaggttgccgctgacgacaaagcgcagcaacgcgtcgtaccctccccggtcttctacgcgctggataccttcacggtcaatttgggcgatgcggatcgcgtgctttatatcggcataaccctgcgcctgaaagatgaagctacccgctcgcggctgagtgagtatttgccggaagtccgtagccgtttgctgttactgttttcgcgtcaggatgctgccgtactggcgacagaagaaggcaagaaaaacctgattgccgagattaaaaccacgctttccaccccgcttgttgccgggcaaccgaaacaggatgtcaccgacgtgctgtataccgcttttattctgcgataacgacatgggcgatagtattctttctcaagctgaaattgatgcgctgttgaatggcgacagcgaagtcaaagacgaaccgacagccagtgttagcggcgaaagtgacattcgtccgtacgatccgaatacccaacgacgggttgtgcgcgaacgtttgcaggcgctggaaatcattaatgagcgctttgctcgccattttcgtatggggctgttcaacctgctgcgccgtagcccggatattaccgtcggggccatccgcattcagccgtaccatgaatttgcccgcaacctgccggtgccgaccaacctgaaccttatccatctgaaaccgctgcgcggcacagggctggtagtgttttcaccgagtctggtgtttatcgccgtggataacctgtttggcggcgatggacgcttcccgaccaaagtggaaggtcgcgagtttacccataccgaacagcgcgtcatcaaccgcatgttaaagctggcgcttgaaggctatagcgacgcctggaaggcgattaatccgctggaagttgagtacgtgcgttcggaaatgcaggtgaaatttaccaatatcaccacctcgccgaacgacattgtggttaacacgccgttccatgtggagattggcaacctgaccggcgaatttaatatctgtctgccattcagcatgatcgagccgctacgggaattgttggttaacccgccgctggaaaactcgcgtaatgaagatcagaactggcgcgataacctggtgcgccaggtgcagcattcacagctggagctggtcgccaactttgccgatatctcgctacgcctgtcgcagattttaaaactgaaacccggcgacgtcctgccgatagaaaaacccgatcgcatcatcgctcatgttgacggcgttccggtactgaccagtcagtacggcaccctcaacggtcagtatgcgttacggatagaacatttgattaacccgattttaaattctctgaacgaggaacagcccaaatgagtgacatgaataatccggccgatgacaacaacggcgcaatggacgatctgtgggctgaagctttgagcgaacaaaaatcaaccagcagcaaaagcgctgccgacgcggtgttccagcaatttggcggtggtgatgtcagcggaacgttgcaggatatcgacctgattatggatattccggtcaagctgaccgtcgagctgggccgtacgcggatgaccatcaaagagctgttgcgtctgacgcaagggtccgtcgtggcgctggacggtctggcgggcgaaccactggatattctgatcaacggttatttaattgcccagggcgaagtggtggtcgttgccgataaatatggcgtgcggatcaccgatatcattactccgtctgagcgaatgcgccgcctgagccgttagtgatgaataaccacgctactgtgcaatcttccgcgccggtttctgctgcgccactgctgcaggtgagcggcgcactcatcgccattattgccctgatcctcgctgctgcctggctggtaaaacggttgggatttgtccctaaacgcactggcgttaacggtctgaaaattagcgccagtgcttcactgggcgcgcgtgaaagggttgtggtggtcgatgtggaagatgcacggctggtgctcggcgttaccgcaggtcaaatcaatctgctgcataaacttcccccttctgcaccaacggaagagataccgcagaccgattttcagtcggtcatgaaaaatttgcttaagcgtagcgggagatcctgatgcgtcgtttattgtctgtcgcacctgtccttctctggctgattacgcccctcgccttcgcgcaactgccgggtatcaccagccagccgctgcctggcggtggacaaagctggtcgctcccggtgcagacgctggtgttcatcacctcgttgacgttcattccagcgattttactgatgatgaccagtttcacccgcatcattattgtttttggtttattgcgtaacgcgctgggaacaccctccgcgccacctaaccaggtattgctggggctggcgctgtttttgaccttttttattatgtcgccggtgatcgataaaatttatgtcgatgcgtaccagccattcagcgaagagaaaatatcaatgcaggaggcgctggaaaaaggggcgcagccgctgcgtgagtttatgctgcgtcagatccgtgaggcggatttagggttgtttgccagactggcgaatactggcccgttgcagggacctgaagccgtgccgatgcgcattttgctcccggcctacgtgaccagcgagttgaaaaccgcatttcagataggcttcacgattttcatcccttttttgattatcgacctggtgattgccagcgtgttgatggcattggggatgatgatggtcccccccgccaccattgctctgccctttaaactgatgttgtttgtactggtggatggctggcaattgctggtcggttcgctggcgcagagcttttacagctagagaggcaaaatgacacctgaatcggtcatgatgatggggactgaagcgatgaaagtcgcgctggcactggctgccccgctgttgctggtggcgctggtcacgggccttatcatcagtattttgcaggccgccacccagatcaacgaaatgacgctgtcgtttattccaaaaatcatcgccgtatttattgccattattattgccggaccgtggatgctcaatctgttgctggattacgtccgcaccttgttcactaacctgccgtatatcatcgggtagcccgtacaatgatgcaggtgacaagcgatcaatggctttcctggctaagtctgtacttctggccgttactgcgcgtgctggcgctcatttctaccgcgccaattctgagcgaacgcagcgtgccgaaacgggtaaaactgggtctggcaatgatgatcacgttcgctattgccccatcattacctgccaacgatgttcctgttttttcgttctttgctctgtggctggccgtgcagcagatcctgatcggcattgcgcttggttttaccatgcaatttgcctttgccgctgtgcgaaccgctggcgaaattatcggtctgcaaatggggctgtcatttgcgacgtttgtcgatccggccagccatctcaatatgcccgttttagcgcgtatcatggatatgctggcgttactgctgttcctgacatttaacggtcatttatggttgatttcactgctggtcgatacctttcacaccctgccaattggtggcgaaccgttgaacagcaatgcgtttctggcactcaccaaagcagggagtttgattttccttaacgggctgatgctggcgttaccgctcattactctgctgctgaccctgaatctggcattaggtttactgaatcgtatggccccgcaattatccatttttgttattggatttccattaactctgactgtcggtatctctttaatggcggcattaatgccgttaattgcgcctttttgcgaacatttattcagtgagatgtttaatttgctggctgatattattagtgaattgccattaatataattccgcaacgtttatcatgttatcctaaggattatccgaaaaataatacctgcgaacatcttccaggatactcctgtagcgaaatatttgttttaagctcactcacatatcgcaacatttactttactttaagacaattccaggcaaattatacaacactttacgggatagtaagtccgcctgaaaaatcgcgagagtggcgcattaggtgacccatgttgttccgtttagtcatgatgaaatattcaggtaaggggaattatcgttacgcattgagtgagggtatgccatgtcaacgattattatggatttatgtagttacacccgactaggtttaaccgggtatctgttgagtagaggggttaaaaaaagagaaatcaacgacattgaaaccgttgatgaccttgccatagcttgtgattcacagcgcccttcagtggtgtttattaatgaggactgtttcatccatgatgcttctaacagtcagcacatcaagcacatcattaatcaacatcccaatacgttatttatcgtttttatggcaattgccaatgttcattttgatgaatatctattggtcagaaaaaatttattgataagttctaaatcgattaaaccggaatctctcgacgatatccttggcgatattctgaaaaaagagacaacgataacctcttttttaaatatgccgacgttatcattgagccgaaccgaatcgagtatgttgcgaatgtggatggcaggtcagggaaccattcaaatctctgaccaaatgaatatcaaagccaagaccgtttcatcgcataaaggtaatattaaacgtaagatcaaaacgcataataaacaggttatctaccatgtcgtccgactgacggataatgtgactaatggtatttttgtcaacatgcgctaacacattctgactggtggtttcccaccagtcaggctgaataagattactctgctttctccacaaagataccgtcctgatgccctgcttcattaaagaaccagatgccgagcgggtagtcttccagcgaaaccaggtacattgtgccttcactaaactcctcaactgccagtaccacgccaggacgacgcggaccgccatccgttttgactgttacccgatcattcaccttcatcgttttcctcctgtggctttgtgccagtgtagaacaatttcgtttttctggcagcgccaggcgcgcgcgagtgctgattttctcgacggtctatacttaagagatgccaggcggacttaacgactggcggcaacaacagagtaacggttgcgaggaaagatgatgaaaaccgcaaaagagtacagcgataccgcaaaacgtgaggtcagcgtcgatgtcgatgccctgctggcggcgatcaatgaaattagcgaaagcgaagttcatcgcagccagaacgattctgaacacgttagcgtcgatggacgtgaatatcatacatggcgtgaattggcggatgccttcgaactggatattcatgacttcagcgtctctgaagtgaatcgttgaatgcacaataaaaaaatcccgaccctgagggggtcgggatgaaacttgcttaagcaagaagcacttaaaaaattcgttacaccaggaaatctgatgtgttcatcaccttatccgcaatttttttcgctgacaagaaaatattcgctatatgaatgattaacgctacttatgaatagaaatgtgacgcacgtcaccccttggtggctctggcgtcagcgggatcgctcccgaaaaaatcatctttgattatttgtgctgttttgagaatcatcctggtaaggggagaactgcgcgaccatgttttcaattcaacaaccactactggtttttagcgatcttgatggcaccctgctggacagtcatagttatgactggcacccggctgccccctggctcagccgtttacgcgaagcgaatgttcccgtcattctctgtagcagtaaaacttcagcggaaatgctgtacttgcaaaaaacgttggggctacaaggcttaccgctgattgcagagaatggtgcagtgatccagcttgctgaacaatggcaggagatagacggttttccacgcatcatctcaggtattagccatggcgaaatcagccaggttttaaatacgctacgcgagaaagaacattttaaattcacgacttttgatgatgtcgacgatgcaaccatcgccgaatggacgggactaagccgtagccaggcggcgctgacgcagctgcatgaggcgtcggtaacgctaatctggcgcgacagtgacgagcgtatggcacaatttaccgctcgtctgaacgaactgggcttacagtttatgcaggatgcgcgcttctggcacgtcctggatgcctctgccggaaaagatcaggccgccaactggattatcgcgacctatcaacaattatcaggcaaacgcccaaccacacttggcctgggcgatgggccaaacgatgcgcccttactggaggtaatggattacgcggtgattgtgaaagggctaaaccgtgaaggggtgcatctgcatgatgaggatccggcccgcgtctggcgaacgcagcgtgaaggaccggaaggatggcgtgaagggctggaccattttttctccgcccgttaagcgttatcgctcgcgaatacccgattacgcccagcctgtttagcgagataaagccgacggtcggccagtgactggagttgttcaaattcataatcaccggtttcctcgctgctgcttacccccagcgaggcactgatgcgtatagtcgtactcttggcgatcaacatctctttttcatttaacttcaggcgaatacgttctgcgacctccgcagcctccgtcagactcgcgcctggcagaatcacacaaaactcctcaccaccgacccgcccggcaacgtcctgcgcacgcaaggaactgctaattaatccggcagcatgagaaagaacacggtcgcccgcctgatggccaaagcggtcattaatcgctttaaaatggtcaaggtcgacctgaatgacagaaaaaggatgttggtgcgtctgacacaatttagcgagcggacgggctttttcgaacagtgcgccacgattatataaacgggttaaggtgtcgtgccacgcctgccactgcaacgagctttgcagaacatacatgttgctaaccatccggcgaatcacataccaggagatgagtaacatggtggtaaagagcgcccacagcagggttaatgcaatgctgatactaccgaaatcgccgcgcacgccttcgcttagcgtatggacgcgcaccagcacaccgtcgaaatggtccagacgttcccagctaacatagcgactgttcatacgaatgccgccccgtgtgtcatgttccattgcctgcgccagcaaggccagttcacgaggatcaaaaatattccctgttggatggtcaggattggaagaggtcaataacctcagcttactgtcatagagctgatactcaccatcgaggtttttatcgatggcgtttcttaaaaattgctgcatggtacgcacgggaatactcatccccagcacgccataccagtagttattactgtctaccggaacactgacggtaacctgcggttcagtattgctggcgtgttccggttgcgaagtgaaccagcgtaccgcgcggtgacgattttctcgttgcgaatggccgataaaccagggttgggtgacatagccgtaataacgcgttggtacattgcgcgtaaataaggtcggctgcgtcgaaacgtaaaatccggcacgcgagacatacatcgcctgttcaaccatcgacgaggagttgtgcgccagtcgcagcaagtaaccaacttccagcgcagcggtaatttcattgtcgaggctttcattttcgcgagacaggagattcccctcgctgactaatgcatccgacacaccattaactggcagagtgcgccgtcggttgagttcaatttgccaggcgtgctcgtcgcgatgctgttcgaactcggttacagcatcacgcagagaggtgaaatccagtggcgctatgagagcttcgcgcatgccattacgcaaaaagatcagtttgtcgacgttatactgcaaatgcttatcgagcgcgttggcaacgttttccagatgattacgctggctggagatataggcatcttccagcaccaccacttcacgccaggtgagcaaggtggaaaaaagcaataccacgataaagcagagattaacgacatgaccaggccccaggcggcgtgcgagttttttcaaccagctctggttttccatttttgtctcgtgctgcaccctgacgactcccaacctgcttttttatgattctggcataagcagaacctggcgatagcgtaccgcaaaacagcgataattttataatggtggcatgataagacgcgactatcattcattgcaggcattggcacaccaggccggatgtgatccggcctggtcttaatgataccctttcaaacttcttccgcagaacgactcccctcccccggaacaagctcggtttcatgaaaagcttcccgcttgaccccgtaaccgtcataccaacgacactcaaccataccgctggagtatccagtgacaatcatccgcgggccgccctctttaaccgtaacttcctcactaaccataaagctcatactcgcctccttttttcgagtgaaacttgttcaccttagttgaagatagcgaattttgcataatagcctgtgcgagtattaatgtgcctgaccgcgtattttcgctacggctttcactcccagcaccacgatgccgccgatgataaatccaagaatcagatttaaaacagtcggtaatatcatcgccaccactgcactttgctgcccggcgaaatgttcaatggcgtgatgcagcggcgcaattccatgtaccacaatcccaccgccgacgaggaacatcgccagcgtgccgacaatcgataacgctttcatcagccagggcgcaatgatcaataaccctttacctaatgcctgcatcagcgcgctggatttttccgccagccaataccccaggtcatcaatcttaacgataacccctaccagaccgtagacgcccacggtcactaccagcgcgatgcctgaaagcaccagcacctgattaagcaacggcgcttcggccacaatccccagcgtgatggcgacgatttccgcagacaatataaaatcggtacgaattgccccttttattttgtccttttcaaacttcagcggatcctgcgccgccagcttctccagacgctgctgactctgcgccggatcttctttatgtttacgcgcctccagcatatgcagcactttctctaccccttcaaagcagagaaacgcgccaccaatcatcaacagaggcgtaatcgcccacgggataaacgcactgatgatcagcgccagcggcaccagaatcactttattaatcagcgatcctttcgccacgccccagaccacgggaagttcccggttggcccgcacacctgaaacttgttgcgcattgagcgataagtcatcccctaatacaccggcggttttcttcgccgccagtttgcccatcacggagatatcgtccagcagtgtggcgatatcatcgagcaacgtcagtaaactactcccggccaaaagcattccctctcatttttattgttgaagggtgtaagtatgaagcaaaaacggcagctctgatacttgcttcacaggtcaacatttttttaacaatcaagtgcaattatatctctcgccagcagaatgattttcacgtttactatgaaccacctttttatttccaccgtgagggattatgcgtttccgccagttattaccgctttttggcgcgctgtttgcgttgtatatcatttggggctcaacctattttgtcattcggattggcgtggaaagctggcctccattaatgatggcgggcgttcgattcctggcagccggtattatattgctggcatttttgctactgcgcggacacaagctccccccgctacgtccgctgctcaatgccgcgctgattggcctgttattgctggctgtcggtaatggcatggtgacggttgccgagcatcaaaatgttccttccggcatcgccgccgtagtggttgcaaccgtgcccctctttaccctgtgcttcagccgcttgtttggcattaaaacgcgcaaactggaatgggtgggtatcgccattgggcttgccggaatcattatgctcaatagcggtggaaatttaagcggcaatccgtggggcgcgattctgattttaatcggctcgattagctgggcgtttggctcggtttatggctcgcgcattaccttacctgtagggatgatggcgggtgcgattgagatgctggcggcaggcgtggtgttaatgatcgcgtcgatgattgcgggtgaaaaactgacggcgctcccttccctttcaggcttccttgcggtcggctatctggcgctgtttggttcgattatcgccatcaacgcttatatgtatttaatccgcaacgtcagtccggctctcgccaccagctacgcctacgttaacccggtggtcgcggtcttgctgggtacgggactgggtggagagacgctttcgaagattgaatggctggcgctcggcgtaattgtcttcgcggtggtgctggtcacgttgggaaaatatctctttccggcaaaacccgtagttgcgccagttattcaggacgcatcaagcgagtaaatgaatcccctgcgtgtcgatctgcgcgctggcaccttcgccgcagatccactcttccagacgctcgctaagcgcttcatccgtcagcttctcgcgcccacgtaacgcgcactcccagacaatcaatacgcgccagccgagttcctgcaagcgactgatatcgcggcgatcgcgctcaacatttttacctatcttctccagccagaactcggttcgagtcgcaggcactttaaacagatagcagtgatgatgatgccagaagcagccatgggtaaatatcacgcagcgatattcatcaacgacaaaatccgggcgtccgggcagactggcgtcctgaacgcgaaacgccagtccctgcccggttaacaaactggcgaggcgcttctcaatcgccgtatcacgcgtggcaatcgcgcgcatatttttgctgcgtgtggccttatcgtgaacatcggccatgttgtgcctcttgctgacgcaacgccaccgcctgtttgatttttggctcaagcagttttgccaccgcggcaaagaccggcacgaccaccgagttaccgaactggcgataggcctgagtgtccgaaaccggaatgcggaatttcgcttctcccggcgcttcaaaacccattaagcgcgcgcattcccgaggcgttaaccgacgtggacgatgttgctgattcagcggatcgtcaaagtctttttcacccgtggccatatcccatccgcgatcgattaaaatttccgcgccatctttgtaataacgcgcagacagcgtacgggtgacgctttgcggattgttcggataaaccattccataaccgaagccgttaccgcgcgcctgatgttttttcgcatatcgatagaggtacttccacagtaccggcgtcaggatatatttcgcctcgaccatcgggtccagcagctgcgccagcgtcactcgctgcgcagggaaacatccgctgatatcacgcagagtaaaatcggctttcaggttaagatcgcgacgaaaacccaccagcacgatgcgttcacggtgctgcggcagaaaatgtttaccatcgatgattttcggatcgtccggcccgttatcttctgcatcagccacgtcatagcccagttcgtccagcgtctgcatgatgatgcggaacgttttaccctggtcgtggcttttcaggtttttgacgttttcgagcacaaacatcgccggacgacgcgcgtcgataatgcgcaccacatcaaagaacagcgtgccctgagtatcgcaggcaaaaccgtgcgcccgcccgagcgagttctttttcgatacgccagccagcgaaaatggctgacaagggaaaccggccagtaaaacatcgtgttcaggaatgtgttgacgaatatgttccgccgccgcctcatcactcacgccttctttatggctgagggtgatgtcgcggatatcttcattaaaatgatgcgtcgccgggtcgcaataatgattggctttataagtgcgtaccgcatgtttgttccattcgctggtaaacacgcactgtccgccaatcgattcaaaaccgcgacggatgccgccaattccggcaaatagatcgataaagcgaaacgcataatgcggatgatgtgccggtggtttgggtaacaacgtttgcagatgggcgaactctttctcacttaaacggtgccatgccgagtcattcgccagcgcacgttttaaaattgccgcgctccagtgattctcacccacaccattaagctgagccaccagcgttttaacatcataaatttgcagcagtttctccagcattgcctgtgcggcattcccggtgctgtatgaatcggttactgatatattttcctgcatagatttaaccggccatctgagatggccgacaggttaacataattacagccatttagggccacgcgcttagcccgcgggtgaaaacgcatctatcaccttgtgatcgacaccttcattctcccccgccagttcggcactgagcttcgccataaactcgactaaaaattgcgcgttgtgctgcgccagctgcttgcctcttacggtttgcatggtttgcggtagcttcaacaacttagtctggaaatgatccagcgcgtagcgtttatcatcaagcgggcgatgctgtgcgagcggatcttcggcatcaaacagcgccacgcccaatgcccctgaaacggcaaacacgcgcgccaggccaatcgcccccagggcttccagccgatccgcatcctggacgattttagcttccgttgttaagggggcgatttgcgcgctgaaactgtgagcggcaatggcatgacaaacggcctcaattttctccgccggaaattgctcgaactcttcacagagcaggcgacgcgtctcttctgccgccaggattgaagaacgctgccgctgcggatgatttttcgccaggctcacaatatcgtgaaaataacaggcggttaaaatcaccagcatatcgacatcgtcatctgccgccagcttctgtgccgtagcccagacgcggcgaaaatgacacacgtcatgggccgcgtcctggtgctgatgatggtttttcaaccagttttcgaactgtgcctgccagtgttgtaagtccatacgcgctccgttgccaaagagtcgccaccttagcagtttttattcatagcgtctgctacgtgcgggacgaggtcgggtgtaccaggcaatgctgcctaacaatgccccgaccagagccataaataaaaatccgaccagtgcccctaaccactttcccgcggtagagcctaaatcgctttcaaatcccgacacgggggcatcggggatccggctcatcacccagatgtaacgcgccattgcccagacgaaatagccacaccgtgtatagaaagcccacaaagccagtttgccgccagggctgcgagagagtctctcttccatctttgtcgaaccgtattccattttgagataacccggaaaattcagacttagtactattatgtgataaaagtcacatttttccacattgaatgagccagtcaagactcaatcattttttgaacaaatagataaattttgcgcaacggcagtgaatacagtaaaaatcgttttgagcgattttatttatctttgatatcggctttattaattcatttaatcaatatattagcactgaatacaattatacctttttatttttctgtgtcatgatgcctccgttattagccttttatcgtcttgtttatattttttgggccggcatgatgccggctttttttatgccttcattaatgtgcgcgtgatcacaccaggtgtttggcgtaacaatcattgatactccctatctttccgctcaacttataatttattgatataaattcataattttcatgaatgcttatattcagaattcataattctgaattatattaaatagattagaaacattttgaaatcttttaaatacatttgttacatgtaatccttaaaataaaatgaacttcatagaatagtatccaaatgtgctttttttggataacggcacttattgatatattcatgaagattataatcacaaggaaatacataatgaaaagaaaagttctggcaatgctggtcccggcgttattagttgctggcgcagcaaatgcggctgaaatttataataaagatggcaataaagttgatttctacggcaagatggttggcgaacgcatctggtcaaatactgatgataataacagcgaaaacgaagatacctcctatgctcgtttcggtgttaaaggtgaaacccaaatcaccagcgaactgactggttttggtcagtttgaatacaacctcgacgccagcaagcccgaaggtgaaaaccaagaaaaaacccgtttaaccttcgccggtttgaaatataacgagttaggatcatttgactatgccgtaactacggtgttgcttatgatgccgcagcttataccgatatgttagttgaatggggtggcgattcctaggcttccgctgacaacttcatgaatggtcgtaccaacggtgttgcaacctaccgtaactatgatttctttggcctggttgatggtcttgattttgcgattcagtaccaaggcaaaaacagcaaccgtagcactaagaaacaaaatggtgacggctatgcgttgtctgtagactataacatcaatggttttggtatcgttggtgcatatagcaaatctgatcgcaccaacgatcaagttgccgatggaaacggttcaaatgctgaactgtggtcattggctgcaaagtatgacgcgaaaaatgtctacgcagctgtaatgtacggcgaaactcgtaatatgactccgggttctattgatacaggtgttgccgatcgagaaggcaatacaataatgcgtgatcaacttatcaatgaaacccagaactttgaagcggttgttcagtatcaattcgactttggtctgcgtccgtccttaggttatgtgtactctaaaggtaaagatatcaaaggggtacccggacatagatatgttgacgctgaccgtgtgaactacattgaagttggtacctggtactactttaataagaacatgaacgtttatactgcatacaaattcaacatgctggataaagatgaggtagcctgagtttaacggacactccttcctgaaatagaatggcatcagaaggagctaataatgagcagaaaaacccaacgttactctaaagagttcaaagccgaagctgtcagaacggttcttgaaaatcaactttcgatcagtgaaggcgcttcccgattatctcttcctgaaggcactttaggacaatgggttaccgccgccagaaaagggctcggtactcctggttcccgcacggtggctgaactggaatctgaaattctgcaactgcgtaaggcgttaaatgaagctcgccttgagcgagatatattaaaaaaagcaactgtagattcaatctgtcaatgcaacacccctttcaattatctctttcggtgttttgaacttcagtgtctttctcggtctgttgtttagctgagcagcaaccagatctagttcatgttgagtatattgggcaagacatgtctttttaggaaagtactgccgaattagcccatttgtgttctcatttgttccccgctgccaaggactctgaggatcgcagaagtaaactttaacgccggtgctgacagtaaattctagatgtctggccagttccattcctctgtcccatgtcagtgattttctgagttctgacggtaaactcaggaatttgtcggtaagagcctgatttactaagacagaatctttgcccctgagtctaaggatgatcgtataacgtgattttcggtctacaagtgtggctatatgagagttttttgtacctgagactaaatcgccctcccaatgccccagagagcgtctgttatcgatatttcgggaacgttcgtgaattggtgttccgttcactatgttaatcgtacctctttcgcctttgcgggtatgacgcctgccatggcgaaggctatgcgaccgtcgcagatgctgtatattcaggtggtgtagcgcttcacggctacgaaagtacagcgttttataaattgtctcaggtgatattcgcagcgttttttgacgtggttttgttcgccttaaccatcctgatatttgctctggagaccatttcatctccagcttttccagaacaagctttcgcaatggtaaattttgatccagtaagcacggttttggccttttcgccattctgttggctcggttattagcatcaacagctttgtaatagcgtctgccccgattacgctgaacttcacgtgagatcgtcgaaggactgcgattcagcgcagtagctatcgcacgaatgctcattttggctgacaaaccagctcgtatctcctcgcgctcagacagtgtcaggtgagctacagcccgcttacgctcatggggttttatgccgccagtatcccttaacatagtgaagatcgttccgggttttgaacccaggatattcgctatttcactgaagcctgttccgttcttccatagttcaaaaacagaggctttttcctctgctgtaaatgttcgtctcattcaaaaaacctccgcaaccccatgttttcacataactgttgcgttgaccaattgaatctacaacagcgtattttgcacaggagtcgctgaaaaatacgcgttaatcgaacaatggcgacaacaatttcccattgaagcgatgtgtcaggtatttggtgtatccaggagcggttattacaactgggtacagcatgaaccctcagacagaaaacaaagtgatgagcggctaaaactggagattaaggtggcacatatccgcactcgcgaaacatatggaacccggcggctccagacggagctggcagagaatggcatcatcgttggtcgtgaccgactggcacgtcttcgtaaggagctaaggctacgctgtaagcagaaacgcaagttcagagcgactacgaactcgaaccacaatctgccagttgcgccaaatctgctgaaccagacgttcgctcctacagcaccaaatcaggtctgggtggcggacctgacgtatgttgccacacaggagggatggttgtacctcgctggcatcaaagatgtttatacgtgcgaaattgtcggctacgccatgggagagcgcatgacaaaagagctgacaggtaaagccctgtttatggcgctcaggagccagcgcccacctgccgggctaatccaccactctgatcgaggttcacagtactgcgcatacgattaccgggtcatacaggagcagtttggtctgaaaacatcaatgtcgcgtaaaggtaactgttacgacaacgctccgatggaaagcttctggggaacgctgaaaaatgagagcctgagccactatcgttttaataaccgggatgaagccatctcagtaatacgggaatacattgagattttctacaatcgtcagcgtcgtcactctcgtctggggaatatctccccggcagccttcagggaaaaatatcatcagatggctgcttaaaaaagaacaaatggtagtgtccgctattgccagtacacctcatatcgttacggcacattaccctgcccctcctggcacaataacatcaaccagcgactcttcaagccaacaccccaaatgcatttctttatgaattaatccgcaacaaacacacttcccatatagaaatatttgcaaaaaaagtgcatggaaaaagctttttctctaccaatccgggatataaatattcatcagcaccacaatattccacagcactaaatctctccccgccgccctgtacctctgataatggtctaaaatcattgaggccacttgcgacgacgttgctcaataaggaaaatttggcgtgaataatattcaacaccagtgcagcatcatcattacatacttacacccgccgactaccgctttcgatatattgactcaattttccagcctggttaaaaatagcgaccagctcagtcgcaaatatagtgactaccctaactaagcaacaataaggaatacactatgactgttcaaacaagtaaaaatccgcaggtcgatattgctgaagataatgcattcttcccttcagaatattcgcttagccaatataccagtcctgtctctgatcttgatggcgtggactatccaaaaccttatcgcggtaaacataaaattctggtgatcgccgcggacgaacgttatttgccgaccgataacggaaaactgttctcgaccggtaaccatccgattgaaacgttgctgccgttgtatcatctccatgctgcaggtttcgaattcgaagtggcgaccatttccggtctgatgaccaagtttgaatactgggctatgccgcacaaagatgaaaaagtaatgccattctttgagcagcataaatcgttgttccgcaatccgaagaaactcgcggatgttgtcgccagcctcaacgctgatagcgaatatgcagcaatctttgttcctggtggtcatggcgcacttattggtttacctgaaagccaggacgtagctgccgctttacagtgggcaatcaaaaatgaccgttttgttatctccctttgccacggcccggcggcttttctggcgcttcgccacggcgataacccactgaatggttattccatttgcgcattcccagacgccgcagacaaacaaacgccagagattggctatatgccgggtcatctcacctggtacttcggcgaagaactgaagaaaatgggcatgaacatcattaatgacgacatcaccgggcgagtacataaggaccgtaaacttctcaccggcgacagtccttttgcagcgaatgcgttgggtaaactggcggcgcaggaaatgctggcagcttacgcgggttaatccctgttacgtttgaatgtaagcgcataatcaatcgcagccgcgttagtactcacgacgtggctgcgttttttcacgggcgtactgaagccctatgttaatttctttgcggtaacgtaatccggaacacattatgcttattgagatagtgatacgtagcacttcccccatgtaattcggcaatcgctttgactaaagaaagaccaagtccctgacctacggaatgacgcgaattatctccccgccaaaatctacggaagagtttttcaggctcattaattttcgttccagggctggcgatatcaatattaagatagctgttggtatcaagaaaactggttatatgaatacgcgatttttctggcgaatatcgaatagcgttaacaataagattcgataacattcgttgcagtaaaattttatccgcaaagatttgctgattgcactcgacattaaagcaaatctctttctcgtctgaaagatattcaagatagtccaacaaattttcgacttccttattgagagaaagcgagtccagtttcaccaaaacattgtttttatctgccctggcaagaaacagtatgttctctgttaaccgcgaaatattttccagctcttcaatgtttccggcaattgttttttgatattcagcgatacttctggtttgactgagcgtaacctgattctgacccagtaatgcattaattggcgttctaagttcatgagcgagatcgtcagcaaactgacttagacgctcaaaatctttgactaaagcatgatgcattttattcaacgcctgcccaagaggttttagttctctcggtaatgcactaacctcaacaggctcccggctatcgttataattcagcgcttccgttacaccactcaactttttgatctctcgtaaccccgttcggattaacagcggacttaatactgagcacagtataatggcgacaatgcaaattataatgctattgattttatactgttcaagcatgttatgtctggctgaagccaatttagccacagtaaccgttaatgatggcgaaacttcatcaatattaattcgtaaagcatctatctctgtgtcattaataatgcttctgtaaatgccagctgcgctgattgtctcactagcaggtatgttatttaacatgccatcactgacatttgtccggttaacaattttattgatgctatcaccatgaatgatcaagatatcctgactaacatccatcatccggttaaagtacacaggtaacgtatctggatttaccccatcaattaacaactgcttgatctgtgctgtccggttaatgagtgttgtatcatcgcgccatttcaactcacttgccaggccattatagagagtccagacaattccagcgccagcaacagacagcagcaatataaaaagcaaggttaaacggacggttatagataatcttttcattatttttttaccgctacgaatgaatagcccatcccccggattgtggcgattagcttttcaggaaaaggatcatcaacttttgcgcggagcctgcgaatggcgacgtccaccgtattggtatcactatcaaagttgattccccaaatttcactcgcaataaccgttctgggtataatttcgccagctctggaggccagtagccaaagtaactgaaactccttgcgcgtcagtgtaatactgatattgtccctgctcacactttgactaacagagtccattcttaagccgctgatttctaatgttgaattcaaagcgtgatgttgccttaattgtgcccgaacccttgccagcaactcagaaaatgaaaaaggttttaccagataatcatttgccccactgtccagccctctgactctgtcatcgacagaatcccttgcagtaaggcaaataacaggggtttgctttgctgttcttaacgtttgtaagatctgccagccatccatacccggaagcataatatccagaatgatcaatgcataatcatccttcagcgcaagataaagcccatctctgccatcagaaacggcatcgatgacataacccgcttcggaaagcccctgcgttacccattcctgggtcctttgattatcttcaataagtagaatcttcatgaaaataatatgccataaatcatatgttatagaaacagcctggttcattacaaaattgtaatgctgctgtaaggttaccctggacgctttttcgctatcctcaaaactcattcacatgacaaggatataaacatgttaaagcgttatttagtactctcggtagcaacggcagcattttcattaccttctttggttaatgccgcacaacaaaacattcttagcgtgcacattttgaaccagcaaacaggaaaacccgctgctgacgtgacagtcactcttgaaaagaaggcggataacggctggttacaacttaataccgccaaaacagataaggatggacgaattaaggcactgtggcccgagcaaactgcaactacgggcgattaccgtgtcgtatttaaaaccggggactatttcaagaaacaaaatcttgaaagtttcttccctgagatccccgttgaatttcatattaataaagtgaacgagcattatcatgtgcctttattacttagccaatatgggtattcaacctatcgtggcagttaatgcataaatatgtaaaagcagatctctgctactgttagggaggacactccctgacagattaacagtaaacggctcttgctggctaacgacaaaaaagtgtgatggcttatgaaaaagaatcaatttttaaaagaatcagatgttacggccgagtcggtattctttatgaagcgtcggcaggtgttaaaagcactgggcatcagtgcaactgcactttctttgcctcacgctgcgcatgccgatctgcttagctggtttaaagggaacgatcgcccgcccgcccccgccggaaaagcgctggagttcagcaagcctgccgcctggcaaaataacctgccactgacgccagcagataaagtttccggttataacaacttctatgaattcgggctggataaagccgatcccgccgctaatgctggtagcctgaaaaccgatccatggacactgaaaatcagcggcgaagtggcaaaaccattgaccctcgatcatgatgacttaacccgtcgcttcccgctggaagagcgtatttatcgtatgcgctgcgtggaagcgtggtcgatggtggtgccgtggattggttttccgctgcacaaattgctggcgcttgccgaacctaccagcaatgcgaagtatgtcgctttcgaaacaatttatgcaccggaacagatgccaggccagcaggaccgctttatcggtggtgggctgaaatatccttatgtcgaaggattgcgtctcgacgaagcaatgcatccgctcacactgatgaccgtaggtgtttatggcaaggcgttaccgccacaaaatggcgcgccggtgcgactgattgtgccgtggaaatatggctttaaagggattaaatcgatagtcagtattaagctgacccgcgagcgtccgccaaccacctggaatctggcagcgcctgacgaatacggtttttacgccaacgttaatccgtatgttgatcacccgcgctggtcacaggctaccgaacgatttattggttcaggcggcatcctcgatgtacagcgccagccaacgctactgtttaatggttacgccgaccaggtggcatcgctgtatcgtggcctggatttgcgggagaatttctaaatgcgtctgacagcaaaacaggtgacatggctgaaagtttgcctgcatcttgccggattgttgccgtttctctggctggtctgggcgatcaatcacggtggactgggtgccgatccggtgaaagatattcagcattttactggtcgcactgcactgaaatttttgctggcgaccttgttaatcacacctctggcacgctacgcaaaacagccgttattgatacgcactcgccgcctgttaggattatggtgctttgcctgggcgacactgcatttaacaagttacgcattgctggagctgggcgtgaataatctggcgttattaggtaaggagttaattacccggccttatttaacgttaggtattatcagctgggtaattttgcttgctttagcgttcacttcaacccaggcgatgcagcgaaaactcggcaagcactggcaacagttgcataatttcgtctatcttgtcgcgattctggccccaatacattatctgtggtcagtgaagattatttcaccgcagccgctcatctacgctgggctggctgtactgcttttagccttacggtataagaagttgcgttccctttttaaccggttacgcaagcaggttcacaacaaattatctgtataacttcatattgccgacaaagtacgcgttatccctgccggatgtggcgcgagcgccctatccggcatacacagatcgcatcaggttatgtttcgtttgtcatcaacctcaaatcaccaaaataatttattttatttcaataagatagataagtagaactgagaaagccatgctctcgtttcctaagagttgttgcattttgctatatgttacaatataacattacacatcatatacattaactctggaggaaactgttttggcgattcgtctttacaaactggctgttgctttaggtgtctttattgttagcgctcctgccttttcgcatggtcatcactcacacggcaaacccttaacagaggtcgaacaaaaagctgctaatggtgtttttgatgatgccaatgtacaaaaccgaacgctcagtgactgggatggagtctggcaatccgtttatcctttactgcaaagtggcaaacttgaccccgtctttcagaagaaagcggatgcagataaaactaaaacatttgctgaaattaaagattattatcacaaaggttatgcaacagatatcgagatgattggcattgaggacggcattgttgaattccatagaaataatgaaacaacatcgtgtaaatatgattacgatggatacaaaatactcacctataaatcaggcaagaaaggcgttcgttacttattcgaatgtaaagatcctgaaagcaaagcccctaaatatatacaatttagcgatcatataattgcaccacgaaaatcatctcattttcacatttttatgggtaatgattcacagcaatctttattaaatgaaatggaaaactggccaacgtattatccatatcagttgagtagcgaagaagtggtcgaggaaatgatgtctcattgagtattctcatgataatgcctcgatgccgctttagtaagttatcataactgccactggtccatccacaaacgccactgaacgcaagctagctacagacacgctcatcactatgacgtgtctgtatattaataagctaacccgcattgagttaaccaataacggattccatacacaatacggccaacagagaaagatacctgtgctcacgccattgcttatattggctggttacaatatgcactatcaattttttaaataacaaattattaaaaccacatctgtataaggaatttttaaggttcgtgggatagcttgactgtgaaaatcacaggagctacaaaaatgaaccgattctcaaaaactcaaatttatttacattggataacgctgcttttcgttgcaataacctatgccgcgatggaactccgtggctggtttcctaaaggtagtagtacttatctgctgatgcgagaaacacattacaatgcgggtatattcgtttgggtgttaatgttttcacgcctgattataaaacaccgttatagtgatccttctattgtgccaccgccacctgcctggcaaatgaaagcggcttcgctaatgcacatcatgctttatataaccttccttgcacttcctctgctggggattgctttgatggcttacagtggaaaatcgtggagtttccttggtttcaatgtgtctccctttgttaccccaaacagcgaaattaaagcactgataaaaaatattcacgaaacctgggcaaatataggctactttttaatcgcagctcacgctggcgcagcactctttcatcactacattcagaaagataatactctgttacgaatgatgcctcgccgcaaataagtcgatcccctgacaaggaaatgtgaaccatggacatcaacgcgtcataaatgtttacgcaagtgcacaatgcaccctttccactatcaacaaggaggagcagaaactgtgtaaatcgtacaatggtaagacttatcaaaaatacaggttaattttggtatttaaaccttttttacttgttagtatgatacaaaggctttcaaaaaagctgggaaattcaacaactcttggaaattatggactttgtcccgcggctttaatctgacggccgcgttccttttttgactcaattattgaccccttctctacgcaacttcagttcccaccaccaactttgcggcagtttcataggatgaatgtctaaaagaataatggtgagcgataagaaaacgactgaataactgcacattttcgctcgaaagcttcctgtcagatccatagcgaatcaagtgctgaatgtcacagtatcgaacagaaaacagtgacgatctaacccttcaagaatattctacgattgttctgtttaggaaaagcaaggcgggaagtcgggagataagtcattgataaagtggcggagagagggggatttgaacccccggtagagttgcccctactccggttttcgagaccgatgatacagagtcgaaaaatcaaagagttaaaaatttttcttggaataaatgtcttaaaatcgtacacgaaaaatcaatgaattacataacattaaagaagaatattccaagccttcttgaggctaccacctgttttcaggtgtcattcagacgtgatttgccccagattgggaaagcacgcttttttctcagctatcgtcctcttattttgccgttacatttctttttgcactctaatgattaatttacaataataatatcggtaattattgagtaataataaattgattattgcaaatgtaatttaattccatcttcgcgttatattccaatctttaatctccgcatggaacaagttgcatgcgtgactatattaagacaacttataaccaccaaaacatttgctttgcaagcaaaaacagtgaccattgactctaagaaaattccgatctattgttagggtcatcaaagttacttaacagtattccgaaatgaaaatacaaagcaagctaattgtcttattaaacattattattgcatttatattatttgagcttttagctcaaaaatttggtttgagtacattattttaaagcaagataaacaatatcgggcactctagtttttataattaaaaattaaacgtccataaaatgttatttacttttcttcgctattgtcatatcttaatatagtggcttacgccactctactttcatcacattttgtacgtttatgtactcgccatgaagctctttcatggcgattttttattcttaatccaagaacatactccctacctatagcaaaatcactttttgaacaaaagaataacgtatttaggtaatcattacgaatttaccctataggtgctactggccattcaatatccggtgcagttgttgtattaacacggttcagcaacacccgatacttcttccaggcttccagcaacgagatttcttcctccgttgcgatttccagatctacagcatcctgaagtggcgcaatatgctcactggctacctgcatcaggctgttttttgtttcttctgcctcccgaatccggaacagtttttctgcttccgtatccttcacccaggctgtgccgttccacttctgatattcccctcccggcgacaaccaggtaacattttccggtaacggaccgagttcagaaataaataacgcgtcgccggaagccacgtcataaaccgttttaccccgatggtcttcaacgagatgccacgatgcctcatcactgttgaaaacagccacgaagcctgccggaatatctggtggtgcaatatcggtactgtttgctggcagacctgtatgaggcggaatatatgcgtcaccttcaccaataaattcattagttccggccagcagattataaatttttatggtccgtgcttgttcactcattctgaatgccattatgcaagcctcacaatatagttaaatgcgatgtttttgacggtgttttccgcgttacccgcagcgttaacggtgatggtgtgtccatgtgagccaatcgcaaccgagtgcgtatgcgcaccaatacctacagtatgtgcatgtgcgccagaacttgctgcagtaccagacagcgagtgggtatgagcacctgctgactgtgtctgaatacgttgataatacgatctactggaagaagtccccgggcttacttgatactgtgaatccttgacataagtgaacccaccgccatcataaaatgctaacgcagaaccgccgcctcctggccaacgaataccattaccatgagtatgagcaccggcagaccccgtagagccactcagactgtgcgtatgcgccccggtgttattcgtggatttagtgccgtaatcaaacgacgatgtggttttcgtccccaaatccgtactggatgcgctggcgctgtgggtgtgcgatttaatgccgtcctgttcctgagacaatacggcacgaccactggcaggtttgcccttaatcgtccagccacgcatatcagggatcacgcctgacggataagcggctgcaagtttcgggtaggcagatttgtcaaaagtctgcccctgcatcagggcataaccagacggaacggtatctgatggccacgggattggtgcgccgactgggtagctttctggtggaagatttttcgaggtataaacttctgcccagccttcctcaaaaccataaccgtctcttgaagaacggtagaacagaccaccatttctgtaatgcgccttcatgaccgttaatattttcctgctcaacagaacacagcgtggtgacatcaatatcctgcttttgtcctgcggtaaactgcacctctttgattgtacagctcagaccaagatagctggcagaatccagggtttctgctgttaccggtgcagacgaaatcataattttcgtcagttgcgaacgctcaaaattagaggacatactcgtctcctgaaaataaaaaacccgccagcggcgggtgggtaaaatcattaacgacctcaggctattacctgaaattcaagcgtggctctgctcagacgggaatcaggatcataaccctgagttttagaaataacggagggtgcaagttgccttaccgcatcaagcgcctgctcacggatatcatctgcgtcatcaggtactgttgcccagacatcgatctgcacggtaattctggattcagcctgaccatcaagcacatcagacgcagtgtcagacaccacagaaaataccagccatggcggagataccgcaggctttccctccgtcagcgggaccacataaggataaacctgtcctccggccagttgagacagcagggaatacagtgtggtctctctcatttacttaagacctcatcaatagcctgattcattcgctgtatggcaatctgtgctgccagttcctctgtcgtatcgaaagccgggcgaatgaacggatgcgcgggcatgtttatcgttcccagctccacaaagcgccagtaaaacgcatttcggggatcactggctttcatgctgttatcactgtttccggtccgcaggttccgtccacgaatgtggacacccgagataatttccccccgacgctttgaacgctgagtgagaacaaccacatttttcttcagtttcccggttcgctccggcgcacgttcaacaactgcatcccgcataacttcagcaccggcacgggtggcatcgcgcagtaccttattgttttctgccctgctgagcgtctccagatcccgtgcaatatccgccagacctgaaaaatcaagactgaaatccatcacacattccccttctgagaacagagtatctcaagccgtgtggcacgagcatccggtatcggcggaccgtctatactcagaatcgcgcctttgaatgcaccagtcagcactttcagacatgaagttgctgttacatctcgccggaatctcatccagaccctcactgtagcctgagcagtttctgcgcctccggatattctctccctgccactgatccccttaacttctgcccatatggttgccccctccgtcattgtttccacagggtgccctgacggagaccgaacggtggtggcattcagaataaccacacgatcacgtaatcttcctgcctgcatgaatcctcctatgttccgggatgaaatcgatacatccgcagtccggtatagaaaaaatcaggcactgcatcctgcatttccctgttctcgtaccagtagccaaccagttgcataagacgcagttttatcagaggtgttattacaagcccggtcgtatcctgctcagaaacagtttcatcgtaaagcgtccggtttaaaaacttttcagcctcttccctggcagcagccagatacatcataagaagagaattctcctgttcattgtcatcatcaatccggcactgaacacgaagctcttccagagtgggcatcatttgggcaacctctatgaatgctgttttttagacttatcagccccccgcgcaacaggtgttctcttatcagagacaatcccagctgcagtggcaatttcgcgtacccgttcgggtaattctttatcttcatactcaccggcccgaataatctcaacacgcataccgtccggtgaccatttcagatcttgtttcaggatcatgattctttcacctgtcagaacaggggcgcacttctgcgccccctgaatgattacgctgctgcaatcttcagcagtttgatggcctgcgaatcgaccagcatcccgccggtgcgcttggtggtataaaaaccgacaaacggtttattggtgtacgggtcacgcagaatgcgggtgccgatacggtcaacgatggtgtaaccccgtttgaagttaccaaatgcaatggctttcgcatcagcggcgatatccggcatctgttcgttttcagcgataccgtaacccgccagagaggacggctgccccagttccagccccggacgccacagatagttaccctcgctgtctttaagcagacggatggcaaacaggctgttgttgttcatcatgaacttcgcgccagtgcggtgtgccttacgcagcgtgtaaatcagtttgataatggcatctgcggtcactgccgtcgcttcgccggatacaatatgctgaagtttgccgaacgcccggaccttgtcggtttcatcagtggactcatacgccaggaaccctttcggcttcttggtaccatcgccggtggtaaaggcaatttcttcctgttcggcaaattcggttgccagctcgctgttgatccaggcctccacgttgaagaaagcatcatccagcattttctgggtggcctgcgggttaccgtagatttcccccatgaaaggttcaatcagtcccagttttgaggtggcagtctgggagcgcgcgtcagtctcgccaacccatccggaagccgtgccgcccagattcaccagttttttgtagtcggaaccgccaacggtgatcaccgtggcttcctggcgcatcaccacttcatctttcagcagattgagaatgttgcgatccagttcttccggcacggcatagccgccgtcttcatcggtgcccacctgtaatgccttacgctccagatcgcgcagaccatcttcacggcctttacgcaggaagcccacaaacgcttctttatgctcggtggccagtttattttgcgcaccacctgccggacgtttcagctcaagcagctctttttcaagatcgcttttgagattttccagctcgctgagttttccgttcagggtttccacctgcccggcaagtttgcctttttcctgctcaatcgcctcaacgcgcttgtcgttctttgctttgaagtcgtcaaacttctgctgcagctcctgcgcgacctgttcgacatctttaatatcaaccgccatcgtatttctcctgattagaagttcagatttttcagtgcattcagtgcagagcccacatcctcagcgtcgcgcagggacagtgcgccatagcccccggccatgaatgctttggcctgggtacgggagagtccgacatcacgcaggactctttcgatttttttctgttcggggatttccccgcgggccagtgcgttcttgacgtcgctgatccgcgcctcgtcgttagacgggaacgtcaccaggctgacttcccagaggtcgatttctttcagcagaaaggcttctttgctccggtcgtattcccagtctttcaggacgtacccaatagaaaggccggttaacgaaccggccttcatgtgtgcatgtgcgcgttttgcgaggggatcatcatcaataagcaaccgtcccctgacgtaaagcccgacatcgtcttccttcatttcggtgtaaacaccgatgggttcatccatgcggtgctgccagagcagcgcaggtaacgcttttctgtcactccacgcccgcagggaagcagcaaatgccccggacatcaccacatcatcgtggctgtcctttacaccaaagacggagccatacccttcaaactcaccggagtcactgacagatttcagactcagcggtacatcaagacgttgtttcgtctgcattggcgttatccttctgcttaccggctttactgccatcggagggtttcgtggtcatgttcatcggggtgagatagacatcaccaccgggacgcggattcatatcttccaggtcgcggcagtcattaggagagtaaattccccagttgatcccggtggcgtaggcttcaaaacgggacttcatatccccgcgcagtaacgccccggcgttaaatttggcgtaataaacgccctgcttactttttcgtaccagtccggtgttgatccgctgctcaatgcgggtcagatacggcaccagtgaatagttgataaatcccagccccagctcttcgatattgttgaaggtggcgcgatcggtgttctgcaccatgtgcaacggcacccgaaacagacgacagatttcttcaagctgaaacttgcgggtttccaggaactggctgtcctcggcgttcagcgccatcgacttccagtccagccccatctcaaggatcatcgggcggtgagcattgccaagcctggtgtgacgctcctcaaaatctttcttcaggcgctcgtaagcctgatctgacagcgtctgctctgtacgcaacacaccggacgtcaccgcaccattgctgaacagtctggccccgtgctcttcggtcgctgccgccagcgatattgcctcgcgggcataggcgatgggattcagccccaccagtccgtccagcgtcagcgtgcgcacatgccagatatcctcctggctcagtacatccgtggagccgtccgggaatgtgacctgatagaccggctcccagctactgttaagcttcggtaccacacagccaggatcgacgggcagcagttcagccacttcgccaaatgctttcactttgtaggcgtaaaagtttcccctcaggcacagacaggtgaccaccagctcccagaactcctgcggcgtcatatatccattgggatgcgtggagatcagcttatgcagacgttcgccggtggctctctgtttcaggctgccgttcaggtgatacagattgcagggcaacatcccgaccgactctgccagcaccctgacgcaggaaaaaaccgccgtcagtcgcatggcccgctggctgctgatctgctttccggtataggtgtcgtatgacagcccgatagcatccgccagctctgctggcgtggtcaccggcgcgtcactttttcgttgaaataatcccgaaaagaacactatttacctccgccgacagacggctgtgtacggtcgagatatcgcgccaccagccacgaccagaacaggcacagcgccccggcaacaacaaaacccgccgggggataaatcagccaggcaccatacgccagcaaaagcgcacccagcacgcccaccagtggcgcgagaattatcagaaacataatgacctcggttaaagcgagcggatgcccacgctgaccagatgttcagacagatccggctccggttcaccaccattgaccagcatccggctcattgctgtaaacatcgcaacagggccgtcgattttggcttccagcgtggatttattcgggaagatattgtcgtttttgtccggttttaccgtaacgttagacatcatccagttcatgaccggatgattgctgtgatggaaacgtccggcatagaccagtgattccgtttccttcatggcctctgacagattgcgaaccgtctgcggaacctccaccagcggtatcccttcttcagccagtgctaggctgaactgcatcgcgctccacgggtcaaatcccagttccctgaggttttcaccaccaatccattccagtaagtcactttttatctgagcatgatcgataacatcaccatccgtcagaatcagcttatccatctccgcccacttccggtaaagttctgcctgctgccgcgagcatcgttccagccgtccttccgggagccagaatttaaaatcggcatgaacatgcccgttatccgttcgccagagttttgccgccgcacagatatcaatcttatgagcaaggtcaacgccgacccacatgggatacgttttcagctcatgtcgcggggcaatgtattcgcacttctcccacttaatcatgtccatccaggcagactctgctgttacccacacattcatgtgtttggtaaaaaaattcacccgcgcagagacctgttctttcgcttttttcgccagacgacgcagatcatcccagcgtttacagatgcccaggccaggattcgctttctgccagaccgtttcatcaaacggatcatctccctcatcgagggtgtaaataatcgcaaagtaggagtcgtcttttacagcgccctccacgtcgctgttatagccacgcaataccttgatggcataatcacgctgctcgtaacaaatcccttccttgttaaaccctgccgtggtgataccaaataaaagggactgcagacgggcaccggttgccgtttccagaacgtcccacacgtcacgggttttatgtgcatgcagctcatcaataatggcgcagtggatgttcagaccatccaggttgtttgcatccgaagaaagcggttcaaattttgatgcgctctgctcctggtaaatcgccagcttgttgaaatcaaacaaccgcccgagtgtcgaccgggcttttctgaccatatttttggcgtcttcaaacacgattctggcctggtcacgcgtggttgcggctgaatacacctcagcaccgccttcaccatctgcccccgtcatatacagaccgatacccgatgacagggttgattttgcgtttttacgggcaacttcgttgtatgctgtccggaaccggcgcaccatcaccgggcgcccgctgccatcgctgcgcatgacaacttccccggtctcttcattgaccagcggaatgacaaaaccaaaaatattaatgaggataaatacatgccagtccatcaactcaataggctggcctgccagcgccccttttacatgaggcacaaatttgtagaaattcaggatgtgctgcgcacgtggttcactgaaataaatcccccgctcttcgccgtactttagatcatcaagaaaacgctggcaggccaggcggacaaattcgccagcaacaatttctcctgcaacaacacgttcggcgtagcggatcccgtcagccacttttgccatcagtctctcgcttttaaaagctccgccagcggatcaacatcatccggtccggcaatatttactttagcccggcttgccggtgacataccaaactctgcaagcattgcccggatccgcttccaggcatccgctttcattgccgccgcggggtgcgccttaatcagtacatcaccgctctgcgtttccgtgcggtaggtatacccctcaacatcgagtgtttcgcagtgatgccgatattcggtataggcttccaccagcaactcgagtgcacgcgcatcaagctgagaaatgatcccttccgcattcagctcttccgccattcgcctgaaccagtacttcccctgtgcccctaaatgctgcggaattttagggagacctttttcatcctttttagcggttttttttgagtctttaacggggcgctttgaggggttgcctcgtatcaaatgcaggcgtggcggggttttcggaggtcctgacataatcggtcttacctatcaatcgtttgttcacatttccaaaaaaagttttcgaacctgcggcgatgtgaggaagggtcaggcggcggtactgagctgccagggttgcagagatttgacccgcccctcccctacagatgggaactgttatcaattaatgcgttcgcgcgctgtttttgctttatggcagggccagcacagactctgcagattactgtctgcatccgtgccaccatgagctttcggaatgatgtggtccacagttctggcttcaacggctctcccatcgcgcaggcagttctgacacagatgattatcacgcttcagtatgcgcgcacgtatggcatcccatttcgtgccatagccacgctggtggcgacttagtccgcgttgatgctgtacccagccttcaccacgatgtttatcgcagtagccagagatgtctgttgttttgcctgcgcagccacgcttacggcatgcgcgggggatttgtgatggcatagaacttcgctccgctaaaaaatattctgctctcaccgtcgttcagttctgcagacactgccgaacaccgtcgacaatttcgcagacctgagaagccatatcgaaaagctggcgcgccttatccatgctgacgcatcccaccaagaaaaaaggcactagtatcgctaccagtgcccatttcgccgttgttcgcggcattctgtgtgtccagtgttttctgctcataacacacctggttatcagcgtttcaactgaaagtgaggcccgtctttcagtgttttccagtccccgccccattcgatggcagttcccagctctgcggcagcctgcttaaatgcctgcgctattttctcgtacagaggccagtcccatgacacctggctgccaacccaggcaacaacatccaccgcatcaccggtcaggtggcggctgttcatggtctggcttttcccttccgcgaccagctgtttctggcgttctttcgtgcgcagcccttccgtaataccgaaatcaacctccgtcagctccagcgcacggcgaacgacagcaaccagctgtggtttaacgccctccagattcttttcgctgcgacgactaaatctgaatttacccgacatattcacctcaacaatggaaagatttttgtgacgttcccgcgcgcgcgtatcaccagcacgcagaacagcagattaaaaaacacttcaggccagcccgttgctaacgggcgaccacacagatagctgaggggcgcaaaggcatacagcagcatcagcagccaggccagccatgacatcagcggtttatgtctggaatcacggcgacgataaaaaaagagcgccagcacgataaccgtgcataacgccacattcagcaatccgggaaggttacttaacattgccgcctcctccaccccgcaggcgggagaacataccggacaccagcgatgcaatatcctgctggtggatgaacgagagaatcttcaccgacaccactgacaccagcactgcacacagtgcgtcgacgggtgcaccgtcaaaccctgtatgctttaccagccaggatgccagaacctctgcgcccagcacgccgataatgaacgacaccagaaaatgcgccgccacacgccaggctgaaagtgcctgcggcatcgttgccacaaataacgccccggcgaacgcaccaaacacaatcccgaaatccgttccggtaaacagcccgaatactgtcgctccaccgagcgccgcagccgtgccggaaccggataagggttcagacatactttttctcctgtaaataaaaaagggccaccagcgacccgtaaaaacaacaccccgtcaaaggcacccgcagatgccttttgtgtggtgttattcagatttgcgcagtaaaggcaggaggacgaccagcgccatcgccaccagcacaccatctgccagcaccgacatcagtcgtccggtgaaatccaccaccactaccagaaacagcaggatggcagccagtacagggcgcgcacttttcacagatactgctccagtggaagctgaagcgcctgtgcaattttcttgagttgcgcttcttcctccggagcaatgccgtcctggtctgcgatatccagacacaggcacagcacattcactgcgtcatcggtaccggcaacatcagccagctgacgaagggcttcggcattggcagaacgcggtgacgcttcataacgggcgcggatatttgcactcatttgtgcaatctcaccggagaacggcgcaaaggcaggaagcgctgcaatggttttctccagcactgcgatttctttcgcatcacaggtgccgtcagcaaaagcaatggaatacgcaccccagacggtcgcctccaccgcatcgcggttctccattttctttacttcagtaatggccttgcgggttttctttttgaaaataccaaacatcgtgacttttccttttagtgggtgagcctgcgcctgggggtgaccagcccacagagaaagtcacactgaccatcccgtaagctcacccctgaaaggctctgtggtttttgatgtgcgccgggcgtgacgcaaagaaatgaaataagacttacctgaaattaaggttaatctgaggatttaaaccatttttaatgcttagtaatataaatacgtctctctggaggagagagatgcttattcttcttcatggactttgtcccgcggctttaatccgacagccgcgcccttttttcgccaatataaacctggttgaactcatacaaaaagctcgccgaagcgagcctgttaaaagtatatttaccgttacaaatggaccgtcaccggggactcgaaccccgcaccacaaaacaacaatacgtgttatgcactcttacccgatgagttagtgacggttttgtgttatgtgggaatccagcctgacgacagaattactggaacaccttgcaaaaaaaagccagccaccagagactggctggcaaattacaaagtttaaatgattcatcatacaatcgtcgttacaggggaatcctgcggtgcagcaagatacaaaaatgtaagcaaaccaacaataagcaagcacagcatattcggaattagttataattttaacgatgcagtgcttattcagcatgcaattctgcaaattaccaaaaaaaaccgcctgctaaggcggtggtcaaatcagtaagtgctgaagagtattattataatacaagtgaggtgtcgggtgcctcccgaaatacctgacattccatcagatactgtagtttcccggctaaactacttaaaccaccccgcacatggagttcacctcattttgtgatgttaacaacatcgggatagtgcataatcagcccctgccaggaaatatcaaaaatcccaccaataatgcactattccgatagcgtcaaaaaacacagcaccgaaatcataactggtctccgttataattcgggagagcgataaaggatatacgagacctttccccgcgaaaaaaacgccagtgctgaaaaacctatacctcatttgtttttctggagcgggcagcgggaatcgaacccgcatcatcagcttggaaggctgaggtaatagccattatacgatgcccgcatatggtgcccgactaccggaatcgaactggtgacctactgattacaagtcagttgctctacctactgagctaagtcggcactggaccgccaccgaggactcgaacctcgcacactcaacttaaagggttaacactctttcttggtgaactggtggcggttggtggcccttgctggattcgaaccagcgacctggcgattatgagtcgctcgctctcaccactgagctaaagggccgggccgaaaataataatcagattaaatcaaaaatcaagcccttgcatagatacatatctgtctggcgggaagccataatagcggtgaaatacagagataaagtaggatctacttgaataaccgcatttttctgctacagcctgtccatatccatgccgggagcataacatatttacagcaacccgcatccgttcctcaagtaacaaattactgaacctgagaccttcatccttgagttttttctttaacaagctctcactcatatgcaactgtagagcaatcgcaccaagcgtccagcttgctgatatatctgtttgaattatcgctctgactttggcacttatactggataaacatccacttaaaaataataacatccgttcatctgattcaaacaacgacaggcaggccatcataagaaacatgtccgtggtctctccggaaagtctctggctggtaattaaagccacagccaacgcaggattgttgggttcctgcgacaagtaaagcggaatgtcagtcagaggagttcttgtcagcttatgctgactttccagatattgacttactatagaatggtttatatcgacaattttaactttgccataatgcataaggaaaagctccctgatgcatttggtggccaaaacaactgagccgggcttaagtgacaacgtatccttttcaagaaaaatattaattggggagcaaaccatgataactgaacagacaacagccattataattttactctaattagcaaaaggttagctcaattatatcccaaagaggtaaattctcatcaacacataagcaaatgactggctggtgccgctaacacccacaagccgcccatttaccacaaataaaaaggataacctgccatacccaccatcacaagccgggtccgtattaactggcagcgttcgcgtgaaaggtaagtattctgcgcaattccccgactgtcgccggttcggtgatgcttaattcattaaataccactctggcggtttcggccatgtcctactgttttagcatgccttttccctgttctggttaacgtgacataccaataactcttgtcgaaaaagccagcaagctgaaagaccagtattcgcaaccaccagcgtgtttaatgtaccgcttttcgggcataaaaaaacccgctcggaggcgggttttatattctttgccatcgcgtacaaaatcagcaaaatatcaaatatgcacgaaatatatgccttttaatctacttttgcaatactttacagtgaaaatgccgccttttgttttgaacgtgttctcgtcacgaacaataaagcctcactatccagccgatgaaaagtgtgtttcattgcaacccagtgaccagtaaatgttttggaccagtttttagttgtcactcccgccagtaatgccagctcctggtattcataaccttccccaccaaaaagttctgcttttactgcctgcgccgccagccagattaattttttcaggcgttcctgcgttttccctgcaatttttctggtaccggattgagtattaaattcattccacgcccactgtgttatcgcgatctgatattcccaacaaatactcccgctgtaacaccacaacaaccaggctttatgatgttcttcaagagacagaacagcccgccgccacgatgatgtcgaaaactcaaccggactgaccagaggaattgacgtccccttcgccagcgattgctttcccgggattggtggataatcccgcgttatcatttttccagtcacttcatcgcggtaccggattttttttcgcctgtaacgccctgtatcgaacatggcattctcttgccaggcttcaagctgaccttttgttgccccactcaaatcagcggtggcgataatgagctgctcgcgcacaaactgtaaatactggttattcatgcgcactccaattctgtgatttttatccccagccgcccaccaggaacgagctgaccgcgcacaatattgatttcatcaaactgctcgtcgtctataagtagtccggcatgcgtcagcgcatccagtggtgccttcaggatattgtccaggtcgcggcggagcttatccggtggctccgcaataatctttatcgccagccttccggacaggtttaatttcaaccgctgctggcgaacaattagcgccacatcatggcgataacgctttccggcctccgagatgaaatacgtattgccatgacgtcgccagtaggtattcaccgtcggcgggtaaggtaaaacaaattctatgcgttcagtcattcatgctttccacttcaggacacccgaatttctcgcgtgcattaaaaaacgaatcagcaacaacagctggctgccatgtttttcttcaaaatcttttaccccggcgtgcagttcgttatgacatttacggcacagcggaataacaaacaaatcgtcagcctttgttcccatccctcccagtccatgaccaatgatgtgatgcggatcatctgcctgattaccgcacgtcatgcatttctgcgtttttacccagcgcgtgtatacaggcatctcttcccgttgtggtttctggcgctggagatactgagccggtgactccggatcaacggcaatgctgaccaccgtcttttcctgtggcgggttttgctggtgggcgtgaggcagcggcgcaagattttttgtgcgctgtttcagtatgctggtggcggtctgctctcccggtacgatgtcgctttcgcggtacaccgagtggattttttccgcacgtaaccccagagaacgacgtagtactgcctccggtagcgcgtctgccacctgattgcagaccgcccaccaggataattcagccagcgataattcccgctcctgtgtgccattcattgcgtgaccgatgacgtcaatcatccatgctgacaggttttgttgtgcaagttgcccgagtgactctgatgtctggtcgcgcagctggttgtcacagtgccagcacaataccatcgcgccagtaccgtaacgatgtatgacggtttcactgtgatggtagtcaccatgaggccactggcaggatttaatatgacgcaggagccagtcagacaatgcgcctgcgccgccagcagcacgaatcacccgttcgtcgctgaaaaatggcagtaatgatttatcttccatcagtggctggcgaacggcaggaacaatcccggatggcagaccgcgcatgcttttcggttccggctccaccagcactcgagggttatgaaatacctgcatggattcacggaccggctttagcaccaccagcccaagttccggtaccggaacaggtcgaagtaatacccgcacgttacctccagatccgttgctggaatgtgcgggacggacgcggtgggcgttcggagtaaggaagcctgacggagattatccagtgacgataatcgaggctgagggctttcttaatctcgtatccgtgtctgcggtagcactgaattagccattcagcttgttcttcagtacatgggggatgctggtaccaatcagatttaaatgcgtgagagcgccgcccgtgcctgctggcaaagacggctgaattatcagaattgtgtaatttggtatcgtgcgccatcggttgtctctgctggcgcagcaggtgccagttgttcaggctggcgtgcgaattgtaaaccagaatgccaggaaaaaacaaaacccgccgaagcgggttaagtgcgggtgcgttgaggatgcctgacacatcagaggtggcgagggatttctcccccgccaggtctcttactcctcaggttcgtaagctgtgaagacagcgacctccgtctggccggttcggattcgtacctcgcagaggtctttcctcgttaccagtgccgtcactatgacggttaaacagatgacgatcagggcgattagcatcgccttttgctgcttcatagcctgcttctccttgcctttcggcacgtaagaggctaacctagatttgccgttcatagattgagcctcagattaatgttaagcgtcttgcaggacgcgtaatgttaactggggcttttctctatctgcctttggtgttcatgcctgagacagatagcctcaagcacccgcagccattctacttaactcccgttacctcgccaatatgaaatcagtcagaaaggcgatccataagaacaacagcaaggcaataaattgccattacagcagcaatagccagcgcacatttgagaaccagcaccacaacctcctgtattggacgtacaccagtcctgataaatatgaggctgtctcgtcagtgattcaatacaactattgggtatagtttctgtgattttgttctgtagaaatggaacacaacaaccagtcaccaccagcacttctttaaatacgccaagtccgacgcaagctaactttctagtccgctttgagcgaaaagcagactgtcacgcgttgaagttaattgtattacttagataaacactatcattttcctgacgttaagttgtatctttgataggattaaaaaacgtatagatagcttatgctactgagggaataaaaatgacgaaaattagtgaacgatggaagcacaatggcattactgaaggttattgcaatatttgtgggaaatatggcttgctcacaaaagatcatgttcctccaaagtgcgccataaccttaggccctgttttgcagaaaacagttagcgaattttttggtattcaggaaccagttaaaccattaaatgctaaaaatggctcttatttcagaaccatttgcagccactgtaacaataaggtattaggtgggctcgatgttgcaattgaaaatgtaacaaagtcctttaaagaacagttaagtcgatatatgaatggtatgaatgtatatccattcattagaataccttttgatagcatatctttcactaaggctatgattgggcacgtgctatcagcaacttcagttgaagattgtaaaaaagaacccgtagatagccccttctatacacctttaaaggattatgttttgggtaaaaattcaagttttgaggaaactcatgatatttactactggttttacccacacagaatgcacatatccgctcaaagtgtagcatttatgaacgaaggacatgtggcatttatttgtgctttacattttttccctatcggttttattatcacaatgaaaaatgaaggaacataccctgcccactctacaaaattagaacttgaagataaattccttacatttaatatgacctctataaattatgagtatacgacatttccatttgtaaatcttaagggaaaccaaatgtatgcgataagcaacggtcatacttgtgtgagttatccaataattaagtgacggctaaatcatacaatctacgcatgttcactttctacatataccatctataatgtccgctgttggcacaaagcggacaaccacgctagctctaccctgtgccacaaaatgtcaatttgcatctgaactaatgcactttaatctcgtcacttcaataaataccgaacatccccctgataaaacgacaatatgcgctgcataacttcactcttccggcactcgcgacagattatgttctgacgcctgtcgtagcgacgtatttctccgtcaggtaatgaccagataaggtccggatcaaccgcagatggtttcttcagctttgcccttgagagctttttacgggcattttgccagtccttacgcgcctgttcagacgggaataacccgtaaccagagttgtatacatcgccgctggcaaccagctctcttgcgagaacgctcatcagatatcttgtcgcacctgttttgacttccagttgccgtaacgtctcacgcccactctggcgtacgagttcaacaacctgccctttaattttttctcgctcttcttgtgtaaaaacttttgccacaagtcctcctgaaaattacctcatgaccagaaatcaacacttaccccctgaagcccggtggaatttcggtatccggttcagaaatatgattcacacaacgctggttgttcgtgccgcttaccgggagcagccaggggttttcaaaattccggtccggtccaaaaaacgtcgtcgctcgctgaacaaattccgttcccgttttcccggtagccgcaaggtatcttgcgtaacgcctcacgccatccagcatggcctctggtgacaccccctcgcgtaatctggccttccaagcactgaaagcggatttcttcgggtttgccccagcacgcaacgggtattcccgccagacctgttcgaacacatccggataatccactcgtcccacaggctgcccggtgttttccgggactacccaatcggcttcccgctgaatggcggaatcggcttcaggctgctgcagttggtgtgattgctccggccttgcggtcatcacctgctgcacagcgcccgaatcggctttcagcgcatacgctgaatcggcttccggtgtcgtgcctgctggctgaccaagattgacggtctgaacatcccctgcctggttcgtggcgttttttacgccatggaccatagtgttttgatcttcttgatctgtatctttatctgtatctttatctgtcgtgactcgtcgtgacatgtgcgtgacatttcgtgacgcgccgtgacaatcgccattttgttcccgctttctttccctctctcgctgcgccctcttgcgctctgcaggagattttgcggtttgcgaaatattgccgttgtcctctttaagcacctggcgtttttcccatccagtgattaaatcaccatcaagtacccgcccctgcatcgtctgcaaaattgaatcaattacctcttctgtcacgtcgagcgcacttgccaaatcttctgtcgtgacatcaatgtgacctcgcgtgacatttcgtgacgcgctcaccaggaggtggatatacactgccatcactgttgcaattggctgccctgacaccctggcaattgttcgccacttagggtcatttggcatgtcatgccataatctgagccaggcgttagccatactcacctcttctgataccgaatctttttactcacgagttgccggaagcgattcgatatggctattgtcagtcaatgtactgccacagcatttcctgccgggccaccacggttcatctgattgaaaccggcgattgccactgcgacaaaatcatcagcgtctctcaccartcgctcccgcgtctccaccagctcccgaaaataagctgaactgtggctgcgcattctggccaccagcaaaggtggcattgccttttcgatcgctggtaacaacgcctgaattttttcaactgcatcaggggtgtctttctctacccagcggaaaattttctgggtattgcgagccagggcttccggatggctgtcgtcatacagttcaggaaacgtcatacccaactcaaaataagcctgggttattccagctgctggaactttttcgccatcaggacgcgcccaggcattcatcgccatgcggatgtgttcatgcttgattttcatgaatcccccccttggttagaaggcggattatgatcagaaccgggaatgacaaccgtcggtatgtgtaactcatatttgagcgccccggcagtgacagcctgaattagcaacgcccatttccacggaacctcttccccccacatgctgactgtggtttttgacgttcctagagctgcggctgttttaacaactccgccaaaatagcctaatacttctgattttttcatgagtcgctccataaaactgaacgccaaaagtttaataatcaaaaccaaagaaagtcaagaaacaaaaccatctgtgttttaaaatcaaaacatgagcaagcaaacaatatctgaacgcataacccaacgtatgcatgcgctaaacctgaaaggcaaagaccttgtcaatgccactggcgcatcaaaaggctccgtaagtcaatggatgaacggtggaggagtgccgtcctcgcgttacataagttcactggcaaagatattgaaagtaaacgaaaattggcttcttaatggaggagagttaaatacaggtgattcgcttgatctatctttaccgccgataaaaacggttccgctactatcacttcagcaggcagcaagctggagtgattatatgaaaaattcctcaataacctcttgtgtgcagcttgtcggagaaatcccggccaatacctttgcagttgttctagagagtgacagtatgtcaacatctggtgggggagtttccatcccaaatggttcaacagtttttgttgatcccgatcgaaccgtacaaccaggaaatattgtccttgccttacccaaagggaccacaacacctgtcattcgtaaactggagatagaagggccggatattcttttagtccccacgaatcctcgctacccttcaattatgctggatgatctatcttgcatattgggcgtatgctttaaaattcaacaagatatttaaccaacctcatctatttgattaactgtatgccatcgtggtgatggcttaacagctgcctgcttaaaatgttttgataaaaaaacattgacctgaaaagttcatttttctaaacttcattcattccctcaccccaccccacagaatgcagggcaatacttcgagttaccaggcagtggtcaggggttaagtagccagcccgaggcgtaagaacatgacggcagggttcaactttaataactatgcagcaggtttttgttccgctaccccggcgttaaggggaaatgaggtcaacatggatactatcgttcttggcaacaacgaatctctggtgtacggcgtgtttcccaacctggacggcacattcaccgcgatgacgtataccaaaagcaaaacgtttaaaaccgaaaatggtgcccgtcgctggctggaaagaaactcaggtgagtgatatggatttcgacacaatcatgaaaaaggcttacgaagaatacttcgaaggccttgccgaaggcgaagaagctctcagcttcagtgagtttaaacaggcgctttccagctcggcaaaatctaacggctgataagcgaagcagcaccgcgaggaatcagtatgcagaaacgagaacccgtcatcatcgcgccagactataccgatgatgaactttatgagtggatgcgccagaaaattaatgcagcgcaggatctgaaatgggccaatgaagccagggctaagcaggctgaaaatctgtccgctctggagcaggatatcaccaggctggaaaaagcagcggcattaagcattgccagaatgattacatacccgcgttaatagctaaccaacgaagctaaggttggtaattaaggagttctccacgggtgagggggagtgcgtgcgccggacacgggtgagcatccggcactgacagtttactgaaaggatatttccctgaaaagtcagaccataacgcgaaagcgcacggcgaggtagctggttcatagatagcctgtcgttaaattatcgtcgaccgtgcgcttccggttgtggcactccgcgaaatggcgcggcggtaagtatggcggggttattccttccccgttgaggacaccgggttgtcaggttgaccatacgcttaagtgacaaccccgctgcaacgccctctgttatcaattttctggtgacgtttggcggtatcagttttactccgtgactgctctgccgccatttttaaagtgaattttgtgatgcggtgaatgcggctaagcgcacgcggaacagttaaaaccaaaaacagtgttatgggtggattctctgtatccggcgttaattgttaactggttaacgtcacctggaggcaccaggcactgcatcacaaagttcattgttgaggacgcgataatgaaaacgttattaccaaacgttaatacgtctgaaggttgttttgaaattggtgtcactatcagtaacccagtatttactgaagatgccattaacaagagaaaacaagaacgggagctattaaataaagtatgcattgtttcaatgctggcccgtttacgtctgcagccaaaaggatatgcacaatgaatccagtatttgcacttattctgacggtttttcttgtttccggagaaccagttgatattgcagtcagtgttcacagaacaatgcaggaatgtatggcagcagcaaccgaacagaaaattccaggcaactgttatccggtcgataaagttatttaccagaataataacgaaatcccggcaggattttaaaacagcaccgtaataaatatccagtttcattcttatatgtcagcaatggcagagatttgttcacccttaaatctgtgatgaggtttaccaataatgagcactgataaagaagaatttgcactatattgcgaagcaaaaaatgacaaagtaagaaaacgcctaggaattaaaggtggtttttactggactacagcaaaaaaattatctgttgcaatctcccgctgcattaccgcaatggatgacaacgattatgatgaagacgactttaaaaaacccgtccgcgtcaatttgcccgttgttgacgaccttccgccagaaggcgtgtttgatactgaattctgcaaccgctatgaaaaaggcgggaaagatggcatcacaatgacatttatcggcccttccccctctgttcaggacaaaccagccagcactgacaataccaacatcaacggcgaagacatgactgagattgaggagagcatgcttctgcctgtctccggtcaggaactgcccattcgttggcttgctcaacacggcagcgaaaaaccagtaacgcacgtttcacgcgacgaactccaggcattacacattgcacgggctgaagaactaccggctgttactgccctggctatttcgcataaaaccagtctgctcgactcgctggagattcgcgacctccacaaactggttcgtgacactgacaaagttttccctaatcctggtaattcagacctgggactaataactgcttttttcgaagcatacctggacgctgactacactgatcggggtctgctgacaaaagagtggatgaaaggaaatcgtgtttcacgcatcacccgcacggcttccggtgctaatgctggcggtgggaacaaaaccgatcgcaatccgaatttagtacacaccctcgacacactggatgtggagattgcagcagccacacttccgatggattttaatatttatgaaattccgggcagcgtttatcgtcgcgcaaaagaagtagtcctgaacaaagaaagtccgttcaaagaatggtccgcagcacttcgtgcaaccccgggtattctggactattcccgcgccgctatttttgcacttatccgaagcgcacaccctgaattttatcactacccgggacgccttcaggggtatatcaacgcctatttgacggaaactgatcacgagaaccccagcaaggaaactctcacagctgcccggcatacgccggaaaaagatatcctggaagaaattaaccgcgaggtggttactgagcgtgaaacagaagaagaaaaaccacaaccatctgacgcaatggcaggtgaacaggcaacaactgaaacaatggaaccggatacaactgaacatggccagaacgcgcagtcgctggatgctcagtcgcaggtgagttccgctaaccaagtaaaagtcaccgctgacgaagtaaacaaaattatgcaggcagccaatatcagccagcctgacgccgataagttacttgctgtatcgcgtggtgaatttgttgaggggattagcgaccctaatgatccgaaatgggtcaaggggatccagactcgcgattctgtgaaccagaatcagcatgaatcggaacggaacgaccaaaaagcggaacaaaacagcccaaatgcgttacaaaacgagccagaaacgaaacaatccgaaccagtagcgcaacaggaaccggaaaaagtctgcaccgcctgcggtcagagcggtggcggcaactgccctgattgtggcgcggtgatgggcgacgcaacataccaggaaacattcgatgaagagaatcaggttgaagttcaggaaaatgatccggaggaaatggaaggcgctgaacatccacacaaggagaaccctggcggcaatcagcatcacgccagcgataataaaactggcgaggcgacagatcccttaattaaggtgaatggtcatcataagctcacatccaccagcagagcggggattcatctgatgatcgaccttgaaaccatgggaaaaaatcccgatgccccgattatctcaataggcgcaatatttttcgatccacaaaccggagatatgggaccggaatttagcaagaccatcgatctggatactgctggcggagtcattgatcgtgacgtcattaaatggtggctaaagcaatcacgtgaagcgcagtctgccattatgaccgatgaaatcccgttagatgatgcactactgcaattgcgggaatttatcgacgaaaactccggtgaattttttgttcaggtctggggtaatggggccaacttcgacaacgtgattttacgccgttcatacgaacgacagggtatcccctgcccgtggcgctactgcaacgatcgcgatgtacgcacaatcgttgagctggggaaagccatagacttcgatgccagaactgctatcccattcgaaggtgagcgccataatgcacttgatgacgctcgttaccaggcaaaatacgtttcagctatctggcaaaaactgatcccgagtcaggctgatttttaatgttcaaccctaattgccgctaaccgtatatagttagcggcggttatgagatatagctatgagcagcttatttttaaccgaagatgaattgctaatattaacgggctgcaaatatgcaagccaccagcgaaaatggttaatggaaaacgggcttccgttctataccaatcgtagtggcaaaccgattgtcagccgggatctatttacctgcaataaaactttaccaccacgcgaggtagagccgaattttggtgcgatctgatgggaagacgaaggaaaaatcctgaacacgaaaaattacctccaaatgtatacccaaataaatatagttatgtatggaaaccaacatccagagaatctgtcacactaaccgccatcaaggatggtttagctgctttatggaaaaagtatgaggaaactgtaaataatcgcgatcgtgcaatgacattcggtcgcttgtgggaaaaattcctcgccagcgcctattacagtgacctcagtccaagaacacaaaaagattatctgcaacatcaaaaaaagttgcttgccgtattcggtaaggtgccggcagattccataaaaccagaacacatccgtcgatacatggacaagagaggggaacagagtaaaacgcaagccaaccatgaaaaaagcagtatgtcccgcgtttacagttgggggtatgagcgagggtacgtgaaggctaacccatgtgcaggtgtaagtaaattcaaggccaaaaaccgcgaacgatatgtaaccgacaaagaataccaggcagtattaagcgttgcacctcttcctgtttttatcgcaatggaaattgcctatctgtgtgcagcgagggtttccgatgtgttatcgctgaaatgggagcagataggaaacgacgggatctttatccagcaagggaaaacagggaaaaaacagataaaagcatggagtccacgattacaggcggcgatcgaaaaagcaaaacagttaccaacatccgcctatgtaatcagcaatcaatacggcaaccgatatgtgtacaaaggctttaacgaaatgtgggtagaagcaagaaatcgcgcaggcaaaatttcaggtattttaaccgacttcacctttcatgatctgaaggcgaaaggaatttcagactatgaaggaagcagtcgggataagcaacttttctctggtcacaaaaccgaggggcaagtgctaatctatgacaggaaggttaaagtttcaccgacacttgatgtcccgttacctgaaaatattccaagaaaatattccaagtaattccaagtgtgatttttgtcactgacttaatgatgtgtaagtgattgaattttggcggagagagggggatttgaacccccggtggagttgcccccactccggttttcgagaccggtccgttcagccgctccggcatctctccgttcagatggttgccatgatgccaggaaatttggcattttaacagtccctgtccgtgcaattttgttcaagtgacgagtttgcgagcaaaacgatgattaagtggccctggaaagtacaagaatcagcacatcaaactgcccttccctggcaggaagcactatcgatcccccttttaacgtgtctgacggaacaggaacaaagcaaattagtcactcttgccgaacgttttttacagcaaaagcggcttgttcctttacagggctttgaactggattcattaagaacctgccggatagcacttctattttgcctacccgttctggaattaggactggaatggctggatggttttcatgaagtcttaatttatcctgcgccatttgtggtcgatgatgaatgggaagacgatatcggtctggtgcataaccaacgtattgttcagtcaggtcagagctggcagcaagggcctatcgttttgaactggttggatatacaagattcttttgatgcttctggttttaacctgattattcatgaagtcgctcataagctggacacccgtaacggcgatcgcgccagcggagttccctttattccgttgcgtgaggttgctggctgggaacacgatcttcatgctgcaatgaacaacattcaggaagaaatcgaattggttggcgagaatgcggcgagcattgatgcttatgctgccagtgatcctgctgaatgttttgccgtactttctgaatatttctttagcgccccagaactttttgctcctcgtttcccttcattgtggcaacgtttctgccaattttatcaacaagatcctttgcagagactgcatcacgctaatgatacagactcgttttcggcgacgaatgttcattaattaacaactttgcagattaattaaccaattgaaatgacttatgaaatttagtgttgacagacaaggtaccgctaagtaatatgcgccccgttcacacgattcctctgtagttcagtcggtagaacggcggactgttaatccgtatgtcactggttcgagtccagtcagaggagccaaattctaaaaattcgcttcttagtgcaatgtcactaaccttagttgaacattgttttttaacggatagcgggtttttaacatcttaagcgccctcgacctttatggttgggggcgttttgctatggcgtcatcaccattttcccctcgattataaaacttgagtaattcagtagtctcccctcttgcaactcacgcccaaaactgcctaacgaaaagttattaattttcaatcatattgctatcaggatttacattttttcgctgtgctagaaagggcgcatttatgttagctcgttcagggaaggtaagcatggctacgaagaagagaagtggagaagaaataaatgaccgacaaatcttatgcgggatgggtatcaaactacgccgcttaactgcgggtatctgcctggtaactcaacttgtgttccctatggctgcggcagcacaaggtgtggtaaacgccgcaacccaacaaccagttcctgcacaaattgccattgcaaatgccaatacggtgccctacacccttggagcgctggaatcggcccaaagcgttgccgaacgtttcggtatttcggtggctgagttacgcaaactcaaccagtttcgtacgtttgctcgaggttttgataatgtccgccagggtgatgaactggatgtcccggcacaagttagtgaaaataatttaaccccgccaccgggtaatagcagtggcaaccttgagcaacagatagccattacttcacagcaaatcgggtctctgctcgccgaggatatgaacagcgagcaagcggcaaatatggcgcgtggatggcctcttctcaggcttcaggcgcaatgacagactggttaagccgcttcggtaccgcaagaatcacgctgggcgtggatgaagattttagcctgaagaactcccagttcgattttctccatccgtggtatgaaacgcctgataatctctttttcagtcagcatactctccatcgtactgacgagcgtacgcagattaacaacggcttaggttggcgtcatttcactcccacatggatgtcgggcatcaacttctttttcgaccacgatcttagccgttaccactcccgcgccggcattggcgcggagtactggcgcgactatctaaaattaagcagtaacggctatttgcgactgaccaactggcgcagcgcacctgaactggacaacgattatgaagcacgcccggccaatggctgggatgtacgcgcagaaggctggctacccgcctggccgcaccttggcggtaaactggtctatgaacagtattatggcgatgaagtggccctgttcgataaagacgatcggcaaagtaatcctcatgccataaccgctggacttaactatacccccttcccgctgatgaccttcagcgcgtagcaacgtcagggtaaacagggcgaaaatgacacccgttttgccgtcgattttacctggcaacctggcagcgcaatgcagaaacagcttgacccgaatgaagtcgctgcacggcgtagccttgcaagcagccgttatgatctggtggatcgcaacaacaacatcgttctggaatatcgcaaaaaagaactggttcgcctgtccctgacagaccccgtgacagggaagtcaggagaagtgaaatcactggtttcgttgctacaaaccaaatatgccctgaaaggctataacgtcgaagccaccgctctggaagctgccggtggtaaagtggttacaacgggtaaagatattctggttaccctgccggcgtaccggttcaccagtacgccagaaaccgataacacctggccgattgaagtcaccgctgaagatgtcaaaggcaatttgttcgaatcgtgaacagagcatggtagtcgttcaggcacctacgttaagccagaaagattcctcggtatcgttaagtacccagacgttgagcgcggattcccattcaaccgccacactgacttttattgcgcatgatgcagcaggtaatcctgttatcgggctggtgctctcgacgcgtcacgaaggtgttcaggacatcaccctttctgactggaaagataatggtgacggaagctatacccagatcctgaccacaggtgcgatgtctggcacgctgacgcttatgccacagctgaacggtgtggatgcggctaaagcccccgccgtggtgaatatcatttctgtttcgtcatcccggactcactcgtcaattaagattgataaggaccgttatctctccggcaatcctatcgaggtaacggtagaactgagagatgaaaatgacaaacctgttaaggagcaaaaacagcaactgaataccgcagtcagcatcgacaatgtgaaacctggtgtcactacagactggaaagaaaccgcagatggcgtctataaggcaacctataccgcctataccaaaggcagtgggcttactgcgaagctattaatgcaaaactggaatgaagatttgcataccgctggatttatcatcgacgccaacccgcagtcagcgaaaattgcgacattatctgccagcaataatggtgtgctcgccaatgagaatgcagcaaacaccgtctcggtcaatgtcgctgatgaaggaagcaacccaatcaatgatcataccgtcacgtttgcggtattaagcggatcggcaacttcctttaacaatcaaaacaccgcaaaaacggatgttaatggtctggcgactattgatctgaaaagtagtaagcaggaagacaacacggttgaagtcacccttgaaaatggcgtgaaacaaacgttaatcgtcagttttgtcggcgactcgagtaccgcacaggttgatctgcagaagtcgaaaaatgaagtggtcgctgacggcaatgacagcgccacaatgaccgcgacagttcgggatgcaaaaggcaacctgctcaatgacgtcaaggtcaccttcaatgttaattcagcagcagcgaaactgagccaaaccgaagtgaatagccacgacgggatcgccacagctacgctgaccagtttgaaaaatggtgattatacggttacggcctctgtgagctctggttctcaggctaatcaacaggtgaattttatcggtgatcaaagtactgcagccctgaccctcagtgtgccttcaggtgatatcactgtcaccaacacagctccgcaacatatgactgcaaccttgcaggataaaaatggcaacccactaaaagataaagaaatcaccttctctgtgccaaacgacgtcgcaagtcggttctcgattagcaacggcggaaaaggcatgacggatagtaacggggttgcaatcgcctccctgaccggcacgttagcgggcacgcatatgatcacggctcgtctggctaacagcaatgtcagcgatgcacagccaatgacgtttgtggcggataaagacagagcggttgtcgttctacaaacatcgaaagcggaaatcattgggaatggcgtggatgagacgaccctgacagcaacagtgaaagatccttttgataacgtggttaaaaatctgtcagtagtcttccgcacctcccccgcagacacgcaactgagtctgaacgcgcgtaatactaatgagaacggtattgctgaagttacccttaagggcacggttttgggtgttcatacagccgaagccatactgcttaacggcaacagagatacgaagatagtcaatattgcgcccgatgccagcaacgcgcaggtcaccctgaacatccctgcacaacaggtggtgacgaataacagcgacagcgtgcagctgacggcgacggtgaaagatccgtcgaatcatccggtggcgggaataacggtgaacttcaccataccacaggacgtggcggcaaactttacccttgaaaataacggtattgccatcactcaggccaatggcgaagcgcatgtcaccctcaaaggcaaaaaagcgggcacgcatacggttaccgcaacgctgggtaacaataatgccagcgatgcgcaaccagtcaccttcgtggcggataaggacagcgcggttgtcgttctgcaaacatcgaaagcggaaatcattgggaatggcgtagatgagacgactctgacggcaacagtgaaagatccttttgataacgcagtaaaagatctacaggtcaccttcagtaccaaccccgcagatactcaacttagtcagagcaaaagcaatactaacgacagtggtgtggccgaagttacctttaagggcacggttttgggtgttcatacagccgaagccacactgcctaacggcaacaacgatacgaagatagtcaatattgcgcccgatgccagcaacgcgcaggttacgctgaacatccctgctcaacaggtggtgacgaataacagcgacagcgtgcagctgacggcgacggtgaaagatccgtcgaatcatccggtggcgggaataacggtgaatttcaccatgccacaggacgtggcggcaaactttaccctcgaaaataacggtattgccatcacccaggccaatggggaagcgcatgtcacgctcaaaggtaaaaaagcgggtacgcatacggttaccgcaacgctgagtaataacaataccagtgattcacagccggtaacgtttgtggcggacaaaacctcggctctggttgttcttcagatatcaaaaaatgagatcacaggtaatggcgtcgatagcgcaacgctaactgcaacggtcaaagatcagttcgacaatgaggtgaacaatcttccggtaacattcagcacagcttcttcaggcctcaccctgaccccaggggaaagtaataccaatgagtctggcatcgcgcaggccactctcgcaggcgttgcctttggtgagcagactgttactgcatcactggctaatactggtgccagcgacaacaaaactgtgcactttattggcgacacaacggcggcaaaaattatcgagttgacgcctgacccaggcagcataatcgccggtaccccacagaacagcaccggtagcgtaatcaccgctacagtcattgataataatggctttccggtgaaaggtgtgactgtgaacttcaccagcaacgcagcgacagccgaaatgacgaatggcggccaagccgtaacgaacgaacagggtaaggctaccgtcacttataccaatacccgctcctcgatagaatcaggagcgagaccggataccgttgaggccagtctggaaaatggtagctccacgcttagcacatcaattaatgtcaacgctgatgcgtctacagcacatctcaccttgttacaggcacttcttgatacagtctccgcaggcgacactaccaatctgtatattgaggtgaaggataattacggcaacggtgtaccccagcaggaggtaaccctcagcgtttcaccaagtgaaggcgtgactcccagtaataacgctatatatacgaccaatcacgacggcaatttttacgcaagctttaccgctacaaaagccggggtttatcaagtgacggcaaccctcgaaaatggcgattcgatacaacaaacggtgacctatgtgccgaacgtcgcgaatgccgaaatcacgctggcagcctcgaaggatccggtgattgccgacaataacgatctcacgacactaacagcaacagtcgctgatacagagggcaatgcgatagccaacactgaagtaacatttactctgccggaagatgtgaaggcgaacttcacgctgagcgatggcggtaaagcggttactgatactgaaggcaaagcgaaagtcacgctgaaaggtacaaaagcaggcgctcatactgttacagcatcgatggctggcggtaagagtgagcagttggtggtgaattttattgcggatacgctcacagcgcaggttaatcttaacgttaccgaggacaactttatcgctaataacgtcgggatgaccaggctgcaggcaacagtgactgatggaaacggcaacccgttagccaatgaggcggtgacattcacgctaccggcagatgtgagcgcaagctttactctcggacaaggcggttccgccattactgacatcaacggcaaggctgaagttacactgagcggtacaaaatccggcacctaccccgtgacagttagcgtgaacaattatggtgtcagtgatacgaaacaggtgactttgattgccgatgctggtaccgcaaaactagcctccttaacctctgtatactcattcgtcgtcagcacgaccgagggcgcgaccatgactgcaagcgtcactgacgctaacggcaacccggtagaaggcataaaagttagtttccgcggaacctccgtcacgctaagcagcaccagcgttgaaacggatgatcggggtttcgctgaaattcttgtgacaagcaccgaggtcggactgaaaacagtttcagcctctctggcagataaacctactgaagtcatctcgcgattactgaatgcaaaagcagatattaattctgcaacgattaccagtctggagatacctgaaggtcaggtcatggtcgcacaagacgtagcagttaaagctcacgtcaacgaccagtttggcaatccgattcttaatgaatctgtaacattcagtgcagagccaccagagcacatgaccatcagccaaaatattgtctctactgatacgcatggtatagccgaggtcactatgacgcccgaaagaaacggttcgtatatggtgaaagcatccctggcgaatggatcctcttatgagaaggatctggtggtaatcgatcaaaaactgacactctcggcgtccagcccgcttatcggtgtcaattccccaacaggtgcaactctgacggcaacgctaacttctgcaaatggcactccagtggagggtcaggtcatcaactttagcgtaacgccagaaggtgcgacgttaagtggcggaaaagtgagaaccaactcttcaggtcaggctccagtcgttctgaccagcaataaagtcggtacatatacggtgactgcatcgttccataacggtgtaacaatacagacacagacaatcgtgaaagtcactggcaactcaagcaccgcccatgttgctagctttatcgctgctccatcgactatcgccgccaccaacagtgatttaagtaccttaaaggcaacggttgaggatggcagtggtaacctgatcgaaggtttaactgtgtacttcgccttaaaaagcggctctgccacattaacgtcattaacagcggtgaccgatcaaaacggaatcgcgacaacaagcgtgaaaggagcgatgacaggtagcgtcacggtaagcgcagtcacgaccgctggtggaatgcaaacagtagatataacgctggtggctggcccggcagacacctcgcagtccgtccttaagaacaatcggtcatcattgaaaggagactttaccgatagtgctgagctacatcttgttctgcacgatatatcaggccatccgatcaaagtttctgaagggctggaatttgtgcagtcaggtaccaacgtgccctatgtgcaagttagtgcaattgactacagtaaaaatttctcaggcgagtacaaagccactgttacaggcggcggagagggtatcgcaacgctgatccctgtattgaatggtgttcatcaagctggtctgagtaccacaatacaattcactcgcgcagaagacaaaataatgagcggtacagtgtcagtcaatggtactgacctaccgacaactacattcccttcgcagggattcaccggggcgtattatcagttgaataatgacaactttgcccctggaaaaacggcggctgattatgagttttcaagctctgcctcctgggtcgatgttgatgctaccggtaaagtgacatataaaaatgtcggcagcaattgggaaaggattacggcgacgccaaaatcaggaggccctagctatgtatacgaaatccgtgtgaagagttggtgggtgaacgccggcgatgctttcatgatatacagccttgctgaaaatttttgcagtagcaatggctacacacttccccgtgcagatcatttaaaccatagtcgttcccgaggcatcgggtcactgtacagtgaatggggagatatggggcattacacgactgaggctggttttcaatcaaatatgtattggtcatctagtcccgcaaactcaaacgaacaatacgtagtttccctggcaacaggtgatcaaagcgtatttgaaaagcttgggtttgcttatgcgacatgttataaaaacctctgattttccgttataatttcttaaagagtgctccattcggggcactcttttttacattccctctatagagcttgctcttctctcaccgaaaatgaataaataaaaatgcgataccgccagattcgcgttcggtgtgactatgatcgtatccggtgagtacagctttgatccaaaggctggttttctgtgatgattgaccagcctcagagtattgatgacaccaccgttcataacagatcggcattactatgcataagtactgtctcatattctcgccaaaacactttttaatgcctttgcgaattcatccagacttatattgtcaattttttgcccaacgacgactgactccgaaacatcggccattgcgggccatcgcgttttgtaatcagcataaattgcaacaacgggggtattataggcacttgccatatgtaatattgaagtgtcaggagttattgcgatataagcatcttttatgattgctgctgaacgtttaatcgagggtgataaggataaacggtagacattattataacaatccactaataccctggctttatcttccccttttggtccatgaacgatcactattggtatatctgtttcactttgaatttttgctattagattttctgcaatcgatagtgaaaatgtacgttcctgcgagctaccttctaaattaagcgcaatgtaagatcctaacgatcgcatttcctcgcgcacctcatcgagtacatcctcacttagtggcaattcatatattggcctgactgctggaaaacccgcctcacgcatcataaatgcccatgtcatgggtacgggagcccggagattctgatccatccgggacgcgttcttacacacaggggaatagcacttcatggttaaatcaacaacctgaaaattcgtttttgctttcaactgactgataaataacatcgttttcaggttctttttacgcatcgcctctatacaaagatccggcgtaccgtattgctgtgttatgttcttcgctaaatcttttatttcttttaatgttgcgtgatcctgcatagtcattgtgactaatgttaatttagtctgttcaagtttgagcacattaaagacttctaaattaattgtcgacgtaacaattaatagatgcttaattttatgcaattcaagcgcccgaataacaggaaagatggccatagcatcgccaatctgatcgggaatatggatgacaacaaagtctgttttttcaatattgaaattataagctttataatcgtagtagctaaatgcaatacgtctcaacaatgatactaaaaacataactaacctcgcctccctactggttataatgcaatgcagtctatcagaatcatcagggtgccattttgtgcatatgcggacttttatgtttcatatctcgaacctgtgggtcctctgcttaatccttaaacaacaccagcaactcccgcgctttcatcttccagcgaatttttcatgttgccgctaatcagccataaaatcatttgcagatgcgctctgtcgaggtagtctcataaggttcgtttatagatcgacggcaatgtgagttaccttttccatactaattataaaaagacagtacaaacaggatcattatggactccacgctcatctccactcgtcccgatgaaaggacggtttcgttaagtcgcgcccgacgagctgcgttaggcagtttcgctggtgccgtcgtcgactggtatgattttttactctatggcatcaccgccgcactggtgtttaatcgcgagtttttcccgcaagtaagcccggcgatgggaacgctcgccgcatttgctacctttggcgtcggattccttttccgtccgctcggcggtgtcattttcggtcactttggcgaccgactgggacgtaagcgcatgttaatgctgactgtctggatgatgggcatcgcgacagccttgattggtattcttccttcattctcgaccattgggtggtgggcacctattttactggtgacgctgcgtgccattcagggatttgccgtcggcggcgaatggggaggcgcggcgttgctttccgttgaaagtgcaccgaaaaataaaaaagccttttacagtagcggtgtacaagttggctacggtgtaggtttactgctttcaaccggactggtttcattgatcagtatgatgacgactgacgaacagtttttaagttggggctggcgtattcctttcctgtttagcatcgtactggtactgggagcattgtgggtgcgcaatggcatggaggagtccgcggaattcgaacaacagcaacataatcaagctgccgcgaaaaaacgcatcccggttatcgaagcgctgttacgacatccaggtgctttcctgaagattattgcgctacggctgtgcgagttgctgacgatgtacatcgttaccgcctttgcacttaattattcaacccagaatatggggttaccgcgcgaacttttccttaatattggtttgctggtaggtggattaagctgcctgacaattccctgttttgcctggcttgccgatcgttttggtcgccgcagggtttatatcacaggtgcgttaatcggaacgttgagcgcatttcctttctttatggcgcttgaagcacaatctattttctggatagttttcttctccataatgctggcaaacattgcgcatgacatggtggtgtgtgtgcaacaaccgatgtttaccgaaatgtttggtgccagttatcgctatagtggcgctggagtcggttatcaggttgccagtgtggttggcggaggatttacaccttttattgccgctgcactcatcacttactttgccgggaactggcatagcgtcgccatgtatttgctggctggatgtctgatttctgcaataaccgctttgttgatgaaagacagtcaacgcgcttgatagcctggcgaagatcatccgatcttcgccttacacttttgtttcacatttctgtgacatactatcggatgtgcggtaattgtatggaacaggagacacacatgaataataagggctccggtctgaccccagctcaggcactggataaactcgacgcgctgtatgagcaatctgtagtcgcattacgcaacgccattggcaactatattacaagtggcgaattacctgatgaaaacgcccgcaaacaaggtctttttgtctatccatcactgaccgtaacctgggacggtagcacaaccaatccccccaaaacgcgcgcatttggtcgttttactcacgcaggcagctacaccaccacgattactcgtcctactctctttcgttcgtatcttaatgaacaacttacgttgctgtatcaggattatggtgcgcatatctcggtgcaaccctcgcagcatgaaatcccttatccttatgtcatcgatggctctgaattgacacttgatcgctcaatgagcgctgggttaactcgctatttccctacaacagaactggcgcaaattggcgatgaaactgcagacggcatttatcacccaactgaattctccccgctatcgcattttgatgcgcgccgcgtcgatttttccctcgcgcggttgcgccattataccggtacgccagttgaacattttcagccgttcgtcttgtttaccaactacacacgttatgtggatgaattcgttcgttggggatgcagccagatcctcgatcctgatagtccctacattgccctttcttgtgctggcgggaactggatcaccgccgaaaccgaagcgccagaagaagccatttccgaccttgcatggaaaaaacaccagatgcccgcgtggcatttaattaccgccgatggtcagggtattactctggtgaatattggcgtgggaccgtcaaatgctaaaaccatctgcgatcatctggcagtactacgcccggatgtctggttgatgattggtcactgtggcggattacgtgaaagtcaggccattggcgattatgtacttgcacacgcttatttacgcgatgaccacgttcttgatgcggttctgccgcccgatattcctattccgagcattgctgaagtgcaacgtgcgctttatgacgccaccaagctggtgagcggcaggcccggtgaggaagttaaacagcggctacgtactggcactgtagtaaccactgatgacaggaactgggaattacgttactcagcttctgcacttcgttttaacttaagccgggccgtagcaattgatatggaaagtgcaaccattgccgcgcaaggatatcgtttccgcgtgccatacgggacactactgtgtgtttcagataaaccgttgcatggcgagattaaacttcccggccaggctaaccgtttttatgaaggtgctatttccgaacacctgcaaattggcattcgggcgatcgatttgctgcgcgcagaaggcgaccgactgcattcacgtaaattacgaacctttaatgagccgccgttccgataataagttatgaaccttcttatcaaaaatagatgtgaaggattaagtaagacatctggcaaatagcccgcaataaacgcgggctgtttgcttccttgggcggatacgagttttattatcgtcttaatgatttccacatattaaaagcaagtatgctttcaaaacacaattataaaaaatcccaccaacaatataagtttatataaaattaaatataatattatgactttagaatatttttatttctaatagacgagatttttcctgttatgatataatatgccgaattaacacatgttaacgatttaccagtaatgtaaataaattttcgaggagatcattccagtgggacgtaaatgggccaatattgttgctaaaaaaacggctaaagacggtgcaacgtctaaaatttatgcaaaattcggtgtagaaatctatgctgctgctaaacaaggtgaacccgatccagaattaaacacatctttaaaattcgttattgaacgtgcaaagcaggcacaagttccaaaacacgttattgataaagcaattgataaagccaaaggcggcggagatgaaacgttcgtgcagggacgttatgaaggctttggtcctaatggctcaatgattatcgccgagacattgacttcaaatgttaaccgtacgattgctaacgttcgcacaattttcaataaaaaaggcggcaatatcggagcggcaggttctgtcagctatatgtttgacaatacgggtgtgattgtatttaaaggaacagaccctgaccatatttttgaaattttacttgaagctgaagttgatgttcgtgatgtgactgaagaagaaggtaacattgttatttatactgaacctactgaccttcataaaggaatcgcggctctaaaagcagctggaatcactgagttctcaacaacagaattagaaatgattgctcaatctgaagttgagctttccccagaagatttagaaatctttgaagggcttgttgatgcccttgaagatgacgacgatgttcaaaaagtttatcataacgtcgcaaatctctaattatattttaaagaaatctgtctttatggcagatttctttaatctcatataatcattataaaaatataatgttcaactcgtcatattgcttataaaaaatccccgtttccagagaaataatatttattaaaattctaggtcttctttttctgattaccgaagacaaagtggcaattacgtatagtttcccgataaagacgcgacagcgacatcccgcataaggcattgttctctttatctttgtacggtacttcatggaacagagattttgaccttgcgaatcgtgatgtctgttgggggcaatttgctcactgaagcgtgagactcgattaaacgcacgaaacacagaaatcaaaaaacccggtcacttttttacaaggtaaccgggtaaaaataatttttattttttaactgttttgagattcatagagatgtctcaaaactaaaatttggctcctctgactggactcgaaccagtgacatacggattaacagtccgccgttctaccgactgaactacagaggaatcgtgagaacgaggcgaatattagcgatgcccaaccacaatgtcaaagcctgttttttaaatttgaaatcgtttgctgaaataatctgcattttgtcgtttattccgacacagctggctttttttcacacttttgcggttcgggtcgagggtatttccatagccaacgtccagtaaccattcgccagtaaaacagcacggcccgcacagcccagtcggcaaacattcccatccagacaccaaccacaccccagccaagcatgatgcccagcacataaccgacgacaacccggcaaccccacatgctcaacatagaaacccacatagcgtaacgggcgtcacgagcccccttaaatccagcgggcagcacccatgaggcggaccaaataggcataaataaagcatttagccaaatcagaatcacaacgacatgtttaacctgtggatcctgggtgtaaaacgatgccataaccccggcaaagggagccgttagccaggcgatggccgttaatccaagagtggaaagccagaacacatgccgcaactgaatctctgcttgcgctatctgtcctacacccaaccttcggcctgtaatgatcgtagaagcagagccgagcgcacttccgggtaagttgataagagccgcaattgaaaacgcgataaaatttccggcaataacactggtccccatcccggcaacgaacatttgggttaataaccgaccactggtaaataacactgattcgacactcgcgggaataccaatccccatgacttcccagataatgctaaaattcagcggtttaaaatagctctttaacgaaatccttagcgcaggattaaaaccaatcgccaacacccacaaaattgcaactgcgccaatataacgagaaatggttaaacccaacccagccccgacaaatcccagtcccggccaggagaaaaggccgtaaatcaatatgccgctaataataatattaagaatattcaggctaccgttaatcagtagcggtattttcgtattccctgcaccacgaagtgccccgctaccaattagagtgatggcagctgctggataactgagtaccgtcagctccagataagtcaacgccagtgctttaacttctgtcgtggcatcacccgcgacgaaatcaataatttgctcgccaaaatgatgaataagcgttgccaacagtacggcaaacaacgtcatgatcaccaatgactgccgcgtcgccaccctcgctcgtcgtcgatcccgcttaccgagactaaatgccacaacgacagtagtaccaagatcgatagcagcaaaaaaagccataatgaccatattgaagctgtccgccaatcccacgccggccatcgcatcttttcccagccagctgaccagaaaagtgctcagaacccccatcaacaggacacaggcattctccatgaagataggaacagcaagcggggttatctcgcgccagaacaacactttgtagctcttgcgtttagcgtgccagcgagtgccgtgaacaacctggcgtaaagcagaggagatattcaaagccgaccttaattgcagaaagtgaaaccacatttcaaataatgagggagaatcagcaaagctgcaaagattttcgccaacaaattgtctgcaaatgcaacaaactgttgatagaaacggcaaacagttgggaaaattaaaaatcgggtttgacaaaagatttttcgccgttaagatgtgcctcaacagcgattcctctgtagttcagtcggtagaacggcggactgttaatccgtatgtcactggttcgagtccagtcagaggagccaaatttctgaaaagcccgcttttatagcgggctttttgctatatctgataatcaatttcctcttcactgttttccatcacctgccgcttgatatcctcaactgaaagtcctgcattacaaagttccagaaagcgccagacatagttacgctgaagttgtcctcgcttcagtcccaaccagacagtattagcatcaaaaagatgccgcgtatccaggcggattaaattcttttcctcttgttcaccgctggattgttcggcaactattccgatcccaagcccaagagcaacataggttttaatgacatcagaatcctgcgcacttaatacaatatctgccagcaaacctttgcgggcaaatgcgtcatcaatacgtgagcgccccgtaatcccctgtcggtaagtgattaacggccacttcgctattgattccagcgtcaatggtgtaatttgcgtcaagggatgatcgagtggaacaagcaaactatggtgccaacgaaaccacgggaaggcgacgagctgcgggtcattactcaaacgctcgctggcgataccaatatcagcttcaccattatgcaacaacgtcgcaatttcctgtggcgtcccctggattagctcgagccgaacctccgggaaaagttcgcgaaaagatttaatgacctctggcaaactataacgtgcctgagtatgcgtcgttgcaatagtgagaacgccagacgtatcgttggtaaacaggtctgcaagccgacgaacattactggcttcattcagaatacgttctgcaatgaccagtaatgctttgcccggttcagtcatgcccagcagtcgcttacctcgtcgaacaaatatttcgatgccaagttcatcctccagttcccgaatatgacggctgacgccggactgtgaggtaaaaagcatattcgcaacctctgtcaggttgtaatcctgacgtgcagcctcgcggattatctttagttgttggaaattcacggtaaactccgggcagttcagattttccgttattgttaaagtctaatgcccggcataacaaataataaaaacccgcatcttattccatcccgatataacgcttagctcaccaattgccactgccttttttccatcactggagaactcatcactgacattaacaactctttcactgcctgtgcctgtggtgacaagtttgctctggcgggtaaatttaaggacaaagagagactcattgaaggagtggtaatgcgtgacatccacccatttactgcgccacataacgaacgcgcagccgattcaggtaatactgcaacgcccatgccgctggcaatcgctgcggtaagcgtggcaatagactcaatttcaccaatgacttttgccgtgagccgccgtagggaaaaagcctcatcaacacgaagtctaacagcgctgtaatcactggggagaaaaaggttcatttgcgcaatagcattaacatcaacgctttgccccgggcaatcttgagttcctaccaggaaaagatcttctttcagcaaagcctgactggataccccagccactggggaatgctcataaatcaccgccatatcgagttggtgatttatcagtttttcgttaagcactgcaccactattttcatgaagatagataacgacctccgggaattcagcgcgaaccgcctgtaataagggcatggtgatggatgacgcagcggttcctggcgcaaagccaatcgagacttgccccgataatgactgaccaacgttatgcaccgccagttgggcctgctcacactgacgtaaaatggcccgtgcatgggtatagagaatttttccggcgtctgttggcgtaacgccccgttttgtgcgaatcaaaagctgttgatttaactcaccttccagtgtggcaacctgctggctgagcgctggttgtgcgatatgcaatacttcagcagcctgggtcaggctaccaatatctacaatttttacgaagtatttcaggcgtctgaagttcatgttgcctccggtttttaagaatcggcccaagtgccgccattacttacaaccagaaagcaagatgcttgccagttctattttggcgttgatgcgcaagctaaccaactgtcaaataaaagattatgatagattcgtcattggccctttttatcagcagtcgcattcacctgccctataaaaggagggtatgcaccacgatggttcattacacaataagattgaaagctcaccactttgttgaaattggcagcaaacaaacaaaaaaatgcatttcaccctttgacatcaccatgcactgccattaatatgcgccccgttcacacgattcctctgtagttcagtcggtagaacggcggactgttaatccgtatgtcactggttcgagtccagtcagaggagccaaattcaaaaaagcctgctttcgagcaggctttttactttctaattatcaacgctcttaaaacatctgtcttgaaccagaactaatttgcacaggcattcccgatcgacgttgcaacgcagcatttgcgcgatttacatcaacttcttgcccgttgataaacgcccgcaaagatggggttaccggcaatggcacttttcggtcagactcatattctgcacgattgcgcgacagcggctcatgaacttccagccactttgaaccatccggttccgttgtgtatttcactggctgatcaataatttgtacacgagtgcctacaggaacattatcaaacagatatttgatatcgtcattacgcagacgaatacagccctgacttacacggagcccaataccaaaattggcattggtaccgtggatggcatacaacctgccaatataaatcgcgtacagccccatggggttatcgggccccgcaggaacaaatgcgggcaaactctcccctcgtttcgcatattcgcgccgggtgttcggcgttggcgtccaggttggtgcttcttgtttacgttcaacggtagtcacccagttacgcggggtttctcgcccagcctggccgataccaataggaaagacttccactgtattactgtctggcggatagtaataaagacgcatttcagcgacgttaaccacaatccctttacgaacagtggcgggcaaaatcagttgctgcggaatggtgagttgtgagccaggcttcggcaaaaaaacatcagcgcccggattcgcttccagcatattacttaacccttgcccgtattgtgcggcaaaagtctccagcggctgagtattgtgatcaggaacagttacagtaagcgactgccccactaaacggctaccctctggaggtaatggataagttaccgccaggctattttggctggcaaaaagcagagcaaatgagcaaaaaatatttacacgacgcatcatgtccctttcctaagtcgcgaaagctatccgttaagtatagcttttatcagacttttcgtttttaactgttcaaatcagaagtcgtattccccggtagaacaatattactggcagcaagttcgcccatgttgttatatatcgcacaggcagcttcgatgatgggcatcgccagagctgcgccactcccctcacctaaacgcatctccatattgagataaggctccagccccaaatgcgacagcgcaatacgcgcccctttttctgccgacaggtgagaaggaatgagatacggtttgattgcaggagacatctggcaggctgcgagcgcggcagcataagaaagaaatccatccagcaacacgggtaaaccgcaggaagcagcgcctaacatcacgccagccattccgaccaaatcaaatccacccacttttgccaggacatcaacgccatcctgcggatttggttgattcaacgtaatcgcccggcgcacaacatcaattttattagccagtttatctgtcggcaggtttgcgccaatcccaaccacttcttcaggatcccggccagtgattgtgctgactattgccgctgccggtgtcgtgtttgccatccccagttcacctacaccaaacagcgtgacaccgttttttgccagctcccgcgtataacatatgacgtccaaaagcaacttttcagcctgacggcgactcattgccggagctgaagcaatattgccgctacctcgtgcgacacgcatgttgataagcccggggataggctcagcactatcaataccaacatcaactacgtggacgttagcgcccgcttgtgctgccagcacacacacgccggttgttccgcgggtcatattttcagcctgaatggctgtcacttcttttggggaaatagcgaccccttcctcccagacgccgtgatcggcacacataaccagtaccgcttttttgcccacatgcggtatgccattcaaccccggcattcccgccagttgtatggcaagcgcctccagccttcccaggctaccaacaggtttgagtaacccgtcaatatgccgttgtgcacgcgacatagcggcaggatcgatagcagggatcgtattcagtaaatcggcaagtgtttgcatgtcacgtctctttatagcagtgccagcaggaagaccagttcaccaagctctatagcagctcccagcgtatcgccggtttgcccgcccagcgtacgtttgagaagctgaccgaggatgaaaatcgccaccatcgtcaccaccatagcagccacaccatgcatacccggcaataatacggcagcaaaaatagcggctaagccgagtgtgacgcaggtttgtcgcccatcaattttgccaatgaacacattgccaagcccttcttcccgcgcataacgatgacgatacatcaataatgcggcagtcccgcggctgaccgcacatgctgccgccagcgatgcaaggatcggttcgccacgcagagccaactcgcttaataccagaatctttgccagtacaacaaaaatcaatgccagaccgccatgggtgcctaaacggctatcacgcatgatttccaacatgcgatcgcggctacgtgcagaaaatacgccatcacaggtatcggcgaggccgtccaggtggaatcccccggtcatcagcgccagcacaagtacgctaaacagtgccgccagtggtacgccacaccatgcctgcagcaccatgaagaccagcccgctaatcgcgccaagcaataatccaattaaaggaaaagtaataataccgcgagaataatgctcgaaatccagtccctgggaccagcgacgcggtacaggcagacgcgtaataaatgagagcatcgcccaaaataatttactcatttgatttttactccaatacccgaaaccaccagccatacttcatttgccgcagcggccaactgctgatttacccgcccggcaatatcacgaaaatgtcgtgccagacgactctccggcacaatccccattcccacttcgttagtcactaatacaacctttgcggggcaacgttggcaggcagcaatcaacgactgaatctcagcattaatcgcctgttccatcgcctgataatcccattcatcagggtctttatcgccgccataatcaaacaacagattagtcaccattgtggtaacgcattccagcaacacaacctcattcgggttaatgtctgcatgaattaattcatcaagatgttgccagcgctccactgtgcgccagtgctccgggcggccttgccgatgatgttctatccgtgcagccatctcatcatcaaggatttgcgaggtagcgatatacagaacctgtgaagagtccccaataagcgcctctgcgtggcgactcttcccgctccgtgcgccccccgtcaccaaaatcatcataccgactcctgattcaaatgtatgatggtattcattgaacagaacaatggatcccccaccgttgctgaccgcaaaacatttacgcgattaatactgcgcgtaatataattaaaaatccagcattctcaatccattacgaaataagatggcattacggaatagccagactttctcgtgttaacgtccgacaaaatgtgtcattgacagcggtttctgtggattgacacatttcattcagataatgaattaatgctactgccggaccaaccagcaaacgggcattgtgttctgaaatccaggctattgattcaacgtcagcgacagatctgcgctgtaaaagaacttgtaaaacaacgcaatagaattatccggaatggtggcgactatgcactagaacaccacaatttcgctctctcggtaaggcactgtcacagcattcaacagaatgtgacttgccagatttattagcgccaccagatgtttaaccgggtaaccacgacccagtcggggatatattccatcttctcgctgacatcatcaagaataaaaaggtttatcacactcagagcaacgttcttcagcaggcgggataattcttcaacatttaaaagatgtgttattaaaggcatacaaactggacgtattgtattttcttttggtggttgacctaaggtagcagtttatcctgatgcgctgagatttctgtaatatctacgtcaacattctcctcgaatagaaaatgcagccccggcaagtgattcacattttttaacaaaacgttgttagcgtgccattttcagaagctctccaagaaagcgaattcttttctcaaattctgcattctcagacacagctttctactccatggcaatggcccaaatacgaagttgctcaggatcattagtggtgctgagaagttaaataaccatgcggagtaccactcgtcatcacgtatttatatatcatgaagctattgttgtgttttgtacatcagtagatgtattctgatatactccttttgctagacataacctttcacctgcttgcaaagcttctgtgttctgacattgccaaattgttgcaattctgtatccagccttctttcagtcatagcttcgggccgcgataagactcactgatctgaccctgattcctcttgcagactttatagaccaattaaaatgcagtttctgcaggtcaacgtctgaccatcattgtcatcactctggccattagagtaaccttctgcattcatccttttgtaaaaagtttatagactggccccctgaatctccagacaaccaatatcacttaaataagtgatagtcctgatacaagtttttagagtagtcattagtgaacagataattgttaacttagaaccagtaaaatgcaaacgacgcaccacgctgggaaaatcgctgctattcagcagagttttgtaccgagaattgtggccagccacttattgctctcgcgtaagcaggtatccccatcgtttaccagtccagcacatcttgtggtcaggcagaagaagagcaaactgttactggactcactgcatgcatgcatggtggagaaaaatgccacgctatccaaaaatccagactgggagaatggttcagctgtgtactgaatcagtggggcgcactctgttattacagtgttgacggtcaggcggaggcagacataatgccgcggaaaaagccctttgtgccatctgtctcggaaataaaaactttatgttcttcggcggcgagcgcagtgcactgttgtatgggcttatcggcacttgccttctgaacgacattgatccggaagcgtatctgcgccatatcctgagcgtactgccggaataaccttccaaccgtattgatgaactcctgccatggaacgtagttctcaccaataaataagcatcaatatgattctccattaacgcttaccttttctcaggctatttttgcttttttttgcttttccccgccactttatggtgattatcacatcaatatacatcgatagatattaacgtaactgcagtgaggtgaagcatgaaatttgaacgccatcatgaaatattgaaacgactcagtaaattcggttctgtaaaagtatccgatctgtccaatagcctcaatgtaacgaaagaaactattcgttcagatcttaatgaacttgccaggcttggctatctgactcgatgtcatggcggtgcttttatcgtcctagactcgcttgatactattgcgaaaaatgaaatcgcttatgcgcttgaaaattatgatacagcccagggaataaaaaaaggccactcaactatgaaaagtcaagtatgcgttattggttcgtttaatgttgatatcatcagttatttgccgaggcttcccactatcggagaatcgcttctggcaagtaattttatattttcaccggggggaaaaggctgtaaccaggcgctggcagcaagctttgccgatactgatgtttatttcataacaaaagtaggtacagatcactttagtgattatgcgatcaactttatgaattcgtctaagatttataaaagtataatttatcaaacgaaagaaacgcaaaccgaaactgccacgatccttgttaatgaaggtactggcgataatgttattgcgatctatcccggtgccaacatgacaatgtcgtccgatgaaataactattcagaaagaagcgattattaattctgatgtcatacttctgcagctcgaaacaaattataccgctctgcaacaagcgatcacattggcgcaaaaaaacagtatcccggtcattattaacccggcaccctataatgatatcgtcaacgaacttattcaggatgttgattatatcacccccaatgaaacagaagctggtttactgtccggcatagacgtacacgatcttgaatcagctaaacgagctgcagaagctatccacaataaaggggtaaaaaacacggttatcacgctcggtagcaagggctcgctcgcatttgatggcaaaaaattcattcattcgccagcgtttccagcggtcgttaaaaatacggcaggagccggggatgcgtttaacggctctctggcatcaggacttgcgaaaggaaaatcactggaatcagcactgtgttatgccagcgcctttgcatccctagcggtggagacaagcaatgcttccgacatgcctgaacatgaatctgtgatacatcgaattcagagtatacattatcagcaaactatttttacgcattaagaagggacagagaatgaataacaccaaaaaatcactaaaagtgctctttattggggaatcctggcatattcatatgattcattcaaaaggatatgacagttttacctcaagtaaatatgaagaaggtgcgacctggttactccagtgtctgaaaaatagtcaggtagatgtcacctatatgccagcacatacggtacaaattgccttccctgaagatgtggcacagttagaacaatatgatgccatcgttattagtgatattggtagtaatactttcctgctacaaaatgatactttttatcagcttcgcataaaaccaaacgctctcgaactgattaaagaatatgtgaataacggtggtgggttattgatgattggcggctatctctcattcatgggaattgaagcaaaagccaattataaaaatacagttctggctgatgtgctcccggttacgatgttagatggtgacgatcgtgtcgaaaaaccagagggtgttattgcacagccatcacaacctgaacatccagttattaaagggttctctgaatatccttttttcctaggttataaccgggcgatcgctaaagaaaatgctgaggtggtattaacaataaacaacgctccattactggtctttggtaactatcacaacgggaaaatagcctgctttatgagtgactgttcaccgcactggggtacacagcagtttatgtcctggccgttctataccgcgttgtgggtaaatatactgactcatattgcaagataataataataatggggtaactccagttactccatgttcttgcccccttatttccagacaggggttgtatcttaagttaacattacccgctgacgtcgatattctcgcggagagcgataacccaacgcactatgcggatggttttcattgtaatgctcgatcgccactgcaaggttatgcaatgccgttcttacattcggtttcggcatgaacgcgatgtagtcttcctttatcgttttcacgaaccgttctgccattccattactctgaggactactgattgccgttgtgcagggctccagattcagctctctggcgaactgccgtgtttcatgcgctctgtacgctgaaccgttatctgtcagccactggatcgactgttccggtactttatcgccaaagcgtttttctatcgctcctaacatcacatcctgcactgtcgctttatcgtaacctcccgtgcttgcggcccagtctatggcttcacgatcgcaacagtccaggacgaacgtaacacgcactttttcgccatcatcacaaccgaactcgaagccatcagaacaccaacgctggtcgctttccttcaccgatattcggcctttatgttcccgctgcagccgtgatggtttgtcatgtaacaacaacaggctgttttcgctcattattcggtaaacgcgctttgcattcacgaacggcaagccttcatttcgggactgccgtctgagtatcgcccagacacggcgatacccatatgctggcatatcgccaatgatatccaggatgcgcgataagacttctgcatccgcagcctcatcgcgtctctgacgccgtttatctggcttgttatccgatgccttcatccgtaatgttaactgcgcacgtgacacgcccagaacacggcttaccggggctattccttgtccgaaggtaacaagggcacatgcgctatccatttttcgcgattgtgcatactccaccgcttctttgaggatctcaacttccatggttttcttacccagtaaacgctgaagctgattaatctgctttattgcagcggccagttcagaagcaggaacaacgtcttcaccggcagccacagcagtgaggcttccttcctggtattgtttcttccacttaaacaacagactgggctgaattccatgcaaacgcgccacgtgggacaccgtcatgcccggctccatagtttgttgaataattgcgattttttcctgaggtgttttacgtttacgcacctcttttcctaacaaaacgccagccatctcaaaattagaactagtgttagacatatatccaagcctatctcttattttaagatacatctactgtctggtatttcagggggccagctcaaactccagttactccatttactataatagaaggattgatgtatgaaaaagaataagtactcaactcccttatggatgcttgccacgattcttgcgggtatgctctcccctatgcaatcagcggtgaatggtcaattaggtcactggttacaggatggtaatgcatgcgcagttatctcctttgccagtggtttagtcgtgatgttttttattattatggcgcgaaaagaaacccggcaacaatttgcggcaattccttctctgattaaaaaccgaaaagttcctctctggaactggtttgccggtctctgtggagcgatggtggtattttctgaaggcgcatcagccagcgcactcggggtcgcaacgtttcaaaccgcactgatctccgcgctattgctgtctggtttactttgcgatcgctttggtatcggtgtcgacgagaaaaaatactttaccccttatcgcatcatcggtgcattatttgcggttattgctacgatttttgttgtgtcacctcagtggcattctacctctttcatcttacttgccattcttccgttcttagctggtttgcttgcaggatggcagcccgctggaaatgcaaaagtagctgaagctacgggatccatgctggtttcaatcacctagaatttcatcgttggattttgtgttttaggcacagcgctagctattcgtgtcgcattagggcacgtcactgttcaattaccagatgtctggtggatgtatcttggcggcccgcttggactaatgtctatcggtttaatggccattttggtcagaggtctggggttactgatgctgggggttgcttcaacggcgggccagttactgggatcagtattgattgacgtattaattccatcgctgggcaatagcgtttatctggtcacgatcatcggaacactgtttgcactggtcggtgcaattgttaccactattccggaatacagaacctcgaaaacaatgaagaaaatggaggtataatcatgaaagattatctacaaactgtgacgggccccgtcgcccgtgaagatatggggctaacacttcctcatgaacatctgttcaacgatctttcctctgttgtggatgctccttgctatcctttttcacaacggcttgttgataaaaaagtcacggcagaaatccagtgggcattaaaacacgatccttattgctgcgctgataatatggaccgcaaacctattgaagatgtgatcttcgaaattaataactttatctcgctcggtggtcgcaccattgttgatgccacagggtctgagtctatcggacgagatgcgcaggcattacgagaagtcgcattaaaaacaggtctgaatattgttgcttcctccggtccctacctggaaaaatttgaaagccagagaattcataaaacggttgatgaactggcgacaacgatcgataaagaattgaatcaagggattggcgatacggatattcgtgccggaatgatcggtgaaataggtgtttcaccgacatttaccgaagccgagcataacagcttgcgggctgcctcgctggcacagattaacaatcctcatgtggcgatgaatattcacatgccgggctggcttcgtcgcggtgatgaagtactcgacattgtgttaggtgaaatgggcgtctcgccaaataaagtctctctcgcacactcggatccgtcaggaaaagacgtggcgtatcagcggaaaatgcttgataaaggtgtctggctggaattcgacatgattggcctagacattaccttcccgaaagagggaatagcgccaggggtgcaggagactgccgatgccgtcgctcatctcattgagttgggatacgccgatcagcttgttctcagccacgatgtcttccttaaacaaatgtgggctaaaaatggcggtaatggctggggatttgttccagatgtttttctggcctatctggcggagcgcggcgtcgataaaacgatcctcaaaaaactctgtatcgataatcccggacgattattgaccgcataaaaccattatcccccggcacattgcgccgggggatgtcaattaataccccgccgttaaatcatccaccaagcgcgagtcggatgcgccgtacaactcaccatccgacccaaccataatgctttgcgtgctgcccatcgcctcattcagcgccactttctgaccttttgcatccagcagcttgagcgtatccggactaaacccttttcaacacgcagctcgtccggcaaccactgatagtggaaacgaggcgcattggtcgcttcggcaacattcattccacaattgatgctgttcaccaccatttgcagcacggtagtgatgatccagctaccggtaacaaagtgagtacataaaggccatactgtcacgaacagtgcaaaagtggctcttccgcaacctgggtgaagattttcatgccagtggactcattaccctccgcctaagtagttcaagtccggctcgaccatacatctggcgtatcagcaccttcaggcgatttacatgaccttcgacaacaccagtactccagcgactgctgattgcctcacatatagccgcagcatcagcttccatccccgcagctacgcaccgaagttctgctgagccgctttcgtggacccgagtgaaccagctgcttagctgtgatttattttaggttttcagaatacgatagaactcgagtaccagttgctgcgctattttcaactccggttctttttcacacatcagactaataaatcggaaagcataattttcttcacccctgattattctccagggcatcaaccagcggcttacccgggacactgaaggaagtcttgcggcagtagtaaccggtgggatccagcctttacgccatttggcaacagcatccctgacgatggtttcactgcctgtaacccccctggccaccatttcccgccatatccggccggagttataattaccacattctcgttgctcttttaaccactccctccatgggtccagaagccctcgctttggaggcctggttgacatttcagggaatgttcctgaacccacccagcgactgactgtcactcgcgacaggcctgtaatacgggatatttccctgaaactacatcccttgttatgcagggccataacctctgtccaacgctgatgccgttttttgcgtgatcttacccagcaatagtggacacgcggctaagtgagtaaactctcagtcagaggtgactcacatgacaaaaacagtatcaaccagtaaaaaaccccgtaaacagcattcgcctgaatttcgcagtgaagccctgaagcttgctgaacgcatcggtgttactgccgcagcccgtgaactcagcctgtatgaatcacagctctacaactggcgcagtaaacagcaaaatcagcagacgtcttctgaacgtgaactggagatgtctaccgagattgcacgtctcaaacgccagctggcagaacgggatgaagagctggctatcctccaaaaggccgcgacatacttcgcgaagcgcctgaaatgaagtatgtctttattgaaaaacatcaggctgagttcagcatcaaagcaatgtgccgcgtgctccgggtggcccgcagcggctggtatacgtggtgtcagcggcggacaaggataagcacgcgtcagcagttccgccaacactgcgacagcgttgtcctcgcggcttttacccggtcaaaacagcgttacggtgccccacgcctgacggatgaactgcgtgctcagggttacccctttaacgtaaaaaccgtggcggcaagcctgcgccgtcagggactgagggcaaaggcctcccggaagttcagcccggtcagctaccgcgcacacggcctgcctgtgtcagaaaatctgttggagcaggatttttacgccagtggcccgaaccagaagtggccaggagacatcacgtacttacgtacagatgaaggctggctgtatctggcagtggtcattgacctgtggtcacgtgccgttattggctggtcaatgtcgccacgcatgacggcgcaactggcctgcgatgccctgcagatggcgctgtggcggcgtaagaggccccggaacgttatcgttcacacggaccgtggaggccagtactgttcagcagattatcaggcgcaactgaagcggcataatctgcgtggaagtatgagcgcaaaaggttgctgctacgataatgcctgcgtggaaagcttctttcattcgctgaaagtggaatgtatccatggagaacactttatcagccgggaaataatgcgggcaacggtgtttaattatatcgaatgtgattacaatcggtggcggcggcacagttggtgtggcggcctcagtccggaacaatttgaaaacaagaacctcgcttaggcctgtgtccatattacgtgggtaggatcatatcagcactgcaacggagacccgctgccgttgcagcccgttttccagcctcacctccagctattaatcccagttgacgttgtaaattttgtaacgcctgtgaagactgctggtgtgaaccggcgaagggagcaagcgactcggcaaaaattttacgtgaacaagccgggttacggcagtaccagtggcggacggaaaatacaagccatagcgtctgccctgagcagggtagatgctgtatccggcgccgacgacaactatgaacagagtcgctacgcttaaagcattcaggacattgtgctgttttgcgttttccgtggagatggagggttataccgtcagagctaataatttgtcgactgcatcgccatccgcaaggtaactgtagaagtgtcttaagagagtgcattgcgttgcccataacttaaaacagcttagatccttgttcgccagaaagtttcatccattttcttccacccaggttgcggaagaaccacttttcatccgtcgttgacagatgtgaagtatgcgggagaaaaagtgaatatctaactgtaataactcagaccggtacgagtactcggaacgtctacaatcattcagggcaaagtgctaaaatttctctatcccgggatgcccctaccaacgcagcactcccggagatatcattacagctctgcaactgatttccgcgactgaaccgctcagttcctatccttccagttgccttcctgcagccccccctccctgctgtataccccggtaccacaacgcgggcagcacttttctccttcataatcttcgtcacacatcacacaaaaccactttctcaccttcaccgtataatccggaaccgtcataccctgcagatgcaaacgacgggcctctttctctgccgggtcaagccaggtgcatcgcagcaggattttctcagcgacagtcatctggtcatgttcaaaccacggtggttgtccgtcattgccccgctgaagtgttaacgggcatccacaggacacacagcacaaaacgtcctggcggttgtgcttcgctgcttctttcgccgtaacaaaatggcctttgctgtcattcgccatataacagttcagaattcgcatatttcctcctgagttgtccggggaatactgaatcctccggtctggcagtgtgtgcagtaccgctccccataataatcgtggtgacattgtctgcagtgccagctggctttacgcaccacgggtaaggcatccggtacgaattgctgcagacgtttaatcaactgtatttctctgcgctccggcctgacataagggcactgttgaccgtgctctgtcagcctgtcgtcagtgtgttcaaaccagggaagttcagtgtcgtattgcggatggtatctgagtgcactgccacacaagtggcaggtgtagttagcataaggtgcggcctgtgcagtacgggcgcccgtcagacgtccgttgccatcaagagcgataaaggattttgcgtacatagtcatattcctcagccgccagacgacacgcaggcaacagccgtcccggtacgggcagcgtggtcagggtatgaatggcggttcagttaaaatctggactggagtttgggtaaagcaggctggttgctgttacagcactgtggttgtcacacaatggaacactgacgtaaaaaacagtcagtgggcgagtggatacatcgttgccgccagacaacaacccatacttttggtttgccggatattggcgcgccagtcgtgctcaactccggctacagccaaaattgcgctcaccggtgcagtgagctttggtatgttccttcgccagatagtcagcacgttccagcacctgctgaaagccagtgtcatcatcgcgttccagccacaccgccggccaggccggaaaatgcaccagcgtggcatggcacccgacatccactcccagggcactgcaccacgcctgtttaatcatcccggccagtgatcccggagcacggtaatcaccggcacgacaccaggtatcccggttaaccagcagcatcaggtgatagtgttttttacctttgcactccccaaactcccgggcccagacgtaatgcagggtggtgggatgcacgcgtttaccttcccgatgcttacgtttctggtaagcgtcgattcgggctttcagggcattgatgaagcgggatatcacagctgcgtccgttgctgccggtacatccgggaaacgcaggtcaacccgcaatgccgtcaggcggggatgaacattcagtgcgtgccgcaccgtctcacgaatacgttgctgccagaaggggttgtatttgtaggtcatggttaaatctccgtatggttcatacggaatagccacgtcgtaaaaaatgcgcagagtccctgaagtgacctccggcaggacactgtctcaggcactctgtgataccccaactatcgtctccggactgacggttgaattttcagcgttgtttttttaatgtaaaaaaccggttacgggtaaggctgtgaggagggagtgatggtgatacgcaaaaagaagtgcagggactgtggaaacgcgattactcataatacatgttgcccgtattgtggttctgtcgcccccttcggctattaccggaatacagaccgtatcgttaccatactgctggcactgattattgtggtcctgctgactactgtcagcgtcagtcagtgtgtatatactgtgtagctggtgagataacggttcatgtatcccctgagctgacagtgtaccgggtatattaagcgtaaccgacaggttctccttcataccatattaaatttttccaggtattgccgctgccttatttcgtcccatacaggaaagctcgtctgggtttctgacaaatacgcgaaactcacagcccctcaatatcaaccacacgctgtaagccggtaatacctgaaaatcagcctattaccgcccgcgcctccgttaccgaacgctcaggtgaccagactgaagcccagcacgcactcgtaaaatttgcggtcagttccgtcagtcagtgggcaaccgcagagttacgggcttccaggtccacaggagtgagtctataacgcgtgtgggaaatcattttttctggcgttgacagaacgccttacgggctgccacttacccggtgtcccgcaatacagccttagtgttccgttatcggggatcaggacgcaccgcaacaaccggggaagtatttctggttagagctgtgtcaagagggatttctcagcccctcactcaccggctcagtctcagggcagaagcattaatacgctcagttcatgtcttatacaggaatgggcatggggggagctggcgtgtcactgctgattttacgcatcagcgttcatgtatctgcactctgatacagaatgcttcacagcgctctgttaccggagagatttactctcttaggttattctggcaaatcctttacgttactctctgatgacttcttatatttataataccaatcagacaaccttatcccatcggtgatatcagtctcctgctcgccaggaacgggctgactcactgtaaccacctccgaaaacaactctgcaattatcagaacgcctgcttctctccctgtcctcacgaaaactatcccctctttatcgcgcgtgcgtgcggaagcatcttttcgcaacaacccccccgggattccgctacggctctgccatcgcaatccccccgtttatctccggacagccacattcccgattattttttacgtttctccccggttgttatgccggtgaaggtggcgcgctgttttcatgaccacaccggctggtttaacaacatccggaggaacattctcatggctaccccagtttcgctgatggatgaccagatggtcgacatggcgtttatcactcaactgaccggcctaaccgataagtggtttgacaaactcatcaaagatgggggctttcctgcgcccatcaaaatggggcgcagctcccgctggctgaaaagtgaagtggaagcctggctgcaggcgcgtattgcacagtcccgtccgtaatttttaaccactaacccttcgcccacagcagacgcaatctccggcctgccggcggcgctctgctgcctgttatcccccgtgaggaatatgaaaatgaaacaacagtatcagacccgttacgagctgctccatgaaaactaccagaaatggctgaccggcttcacccggcacgccgtatcatggggcgtgtgtcatccgaatatctactatttccataatctgacgcccgggtgggtgtcattcaatggcgaaaaaccggagattgccatcgttccccagagtctgcaccggctgatttatggtccggacaaacggagctccccgtccctggatgatgatctggtggtgaatttatgcaccagcgaacacctgctggttcatcatccgatgctggaagggatcctgctgtctgaatgtgagcgcctgaagcaacattctctggcaaacaaactgatcagcctcttccgtcagtttggcggcacggagttacgtctcaaactggtctggctctgctggcttgacttaatgaccggaaacagccttgacgactggacgaaaaacctgaaacacaaatcagaaaaagatctggagcaatggatcattgcacgtcagggtcagagtgaaccactgacaaatctgatggatcagtacgtgcttatggcataccgtacatcggttgatgccgctcacagttgatgtctgagaaccacagggctggcagcagaaaaccagccctgtggtaaaatacagtaatagcggcgtacatcaggcacgccgctcactcgtccacagatcatatacgtcattatactgcgcgataacggagggcttcagcacccggtcatttctgagcgggtatgaataccattgatgatgcgaagcagccacgggcagaaacgttcttcacaaccaggtgcctccatcttcactgcagtctgaatgtgccggcttgttatccaccagaaatggtatgctccggtacatgcataccccggagactataaacgcactgaatcatagcctcccacctcagcaggaggcagtcagctttcaggcggaaaaacgttgcagttaaagatcgtgagaatcgctgtttcgttgcatagcaacccgaacagttgtagtgaaacattttacctgcatcagcacatggtcaggcgccgtctgtatggcgtggaatactgatgtttcggctgatggcaagcctcattctctgtggaaacaggggcgcgcattagcttctcaaccagagagtgtcacaaagacaaatattgctgaaaatcgcattcatcgttcaggcgtgaatgcccggagacaaaagccgctgtccacacagtccccctctgacctgaacaaaaagcatacacacaacaggctcacctgaccccgaaaaaccataacttcagcaataccagtgacaccagcacgttacctcagtgccacatcttcagaccgcgatcaatctgaaatgtgactatcggggcaatatccctgctttgtggtacacgataaccagaaaacatcccctgaaccgccagccagaaagactggccacaaaaggggtaagctgaaatcgtttatggattacatcgacatatgcctggcagagaatgtccggaatgacgaggttatctttgcggagattaaggcaatggtatacgggccgacgttccatgccgcgttactacattcagcccggacgtaaaatgcgcccgtcaaaaagaacggttcgcttcgaaactcagccaggataccacctctccgccacacccgggaagaagttgatatggtggttgctggacaacagcgctcctggattgactgctgcatcactcaaccacgctgaatatcaaaggagagcgttaccggttaaaagagaaacgtaaagctgtggtgatgacccaaaacgcaacgcctgtcagtgaggatgaaatggtgaaaagcggacagcatcagtaacggaagtatcttagcgggtacgaaaatggcaggatcgtgacattgacagaatatctcctgatcatcctgaatgactgcagttgctgtagaaaagtaagctgtctccacccacggcaccacttaacaggcattccgtaacttcccccagacttactatgacgcattatcggtgcactgaaaacgggagagtgcgcttaaaaccgcagaccgcatgcgggtgttactgcatgacagtctggccgtattgtgagatgtcggcaggaaccgatgtccgcgcaggggggaacttcctgcagtacctgacgcttcaaatggtattaaccgtagggtgttgttggttccggatcgcggaaatgggagcacaggtctgctacggggtgtacctctgacagtatatccggctcgctcatctgacagcctctctcccggaaaagaccaaaaatgagatcgtctcctcaacagcagagaagaggtcttgacagacaggctacattgcatacgatttatgaagaaaaagacagcaaatatggaggttatagcggagaataccctacgaaattcctatgaaaaacgattgaaaaaaatatcaaattcgattcgtttttatatgctttttgggagcgtggcgatgacgaactgttgcatgtgcagaggagaatgcacccggaagcaccagaatcatccagaaaggcagaacgattacgcatcaaaccaggagacagcaatatcaaggtaatatactgatttaaaatgaatttacagcaatacgtaaaaacattttttacttaaaggagacagatgcgctgaagagagtgcaggtatttttatataaaaatgagaagtttacgggatgtatatccggcacactatgaccggagaatatcagtcaagcttaaaaagacaataaatacagtgagttaaatacacagagaaaacgtagtatcagagggtacatcttacaacagagactgaatttccggtttttcataaccggcgcattccggaaagtgcaggcggcccggaggttttctgacgccactacctggtagattgttctgtacatcatgtacggaggtttttgtttgcttttttaaaatctgcaaatgtgagaaaagcaggtgaggtgtattgtgggaaaggaactggatgatatctgcaccagctgtccgtatatcgatgctgtaaaacggcacaaacaacagctcggtgccatagaggaatatacacagtggttaaaaaaagaaccacgggcatcttatttttttctgttccagctgtatacccgcattcacaatacatttttctcccaaaagcaacaactcccgttcactcccggtggcactcactgcccggaacctgatgtcacccttcgggacttaacgctttcccctggctaccacagtgattatgcccctcaacccattccggagatggacagttctgctgttgttcccccaactaatgaaaacacctcgcctccggaagatactcccgacaacactccggccggaggcaataccggacaagcggaaaagaccagaaacgcaggactcacacccattcctgaaaaacgttcaggaatgcccccggaacatctgcggtttgccacggggtttccatcgcaaccgaagattgccggtcccagagaaaagccgatgcgcaccgtgcatccggataaaatctaccgtgaaattatatggttctgctccagttacctgctgaaatccggaccagaggctacgaggacgattatcaactcagtattctctgaatgggccagcataaacaatgattacccctcccccttttcgtgggtggacagcagggacagtgaacagtgtgactggttatggaacgccatgcaggtccggtgtgtgggaaccccgctgaatccccttaccccggagcagaaatactggtttgcctgcgccacgtttgataactgggagggctggaatgagcaacaggtacagtttttactggaaagtaatcccagacggaacagagcgaagtttacgcaggtctccttccaggcccccaggattcagcataaagcgattcttcttgatgagctgaaaagtgcccgggagcaacaaaaaaggcgtgatgaacgtgctgatggttccgtccctctgaaactgtccggaaaaatccacaaacagcttgaaagtattgcccgaagtcgtggtgtcctcccaaaaaaactgctgaatgaaatgattgagcaggcgtaccatgatttggtggcaaccaggcagaacagccaaatcgattccagataatttcagacagatattatttccgtgaatcccccgccacctttccggtgcgcggggttttgtcttttttcaccgggaatacatgtatgaatccgtctgatgccattgaggcaattgaaaaaccgctctcctccctgccttactcactttcccgtcacatcctggaacatctgcgcaaactcaccagtcacgaacccgtgcctggcattatgggtaaaagcggggccggtaaatcctcactctgtaatgcgctgtttcagggggaggtcaccccggtcagtgatgttcacgccggcacccgggaagtgcagcgcttccgtctgaatggccatggtcacagcatggttatcactgacctgcccggggtgggcgagagccgggacagggatgcagagtttgaagccctgtaccgtgacattctgctcgaactggacctggtactgtggctgattaaagccgatgaccgtgccctgtctgtggatgagtatttctggcgacacatcctgcaccggggacatcagcgggtactgtttgtggtgatgcaggccgataaaacggagccctgccatgaatgggatatggccggtattcagccttctcccgcagaggcacagaacattcgcgaaaaaacggaggcggtattccgtctgttccggcccgtacatcgggttgttgccgtatcggcccgcaccggctgggaactggatacgctggtcagtgcgctcatgacagcacttcccgaccatgccgccagtcccctgatgacccgcctgcaggacgagctgcgcacggagtctgtccggtctcaggcccgtgaacagtttaccggtgcggtggaccggatatttgacacggcggagagcgtctgcattgcctctgttgcacgcacggttctgcgcgccgtccgtgactcggtggtctctgttgcccgcgcggtatggaactggattttcttctgaacccggtggtgatgtaccaggctgttgttacagatttttaactccatgaaaacactatgcaaacgcagccatacccgggttgtccccttgcgttgtgtttctcaagttaatagaatacatcgatcgttactatcatatcgatcgttataaacgatcgtttgtagtaaatgacctcctccgtggttgtcatgaaaatgcgtcttaggaaggttaaataatgcacgaaaagaacatcgccctgctttgtgatgaagccgaccgacttttgcaactgaacattaatctgctccggcaaatggttgaggagccagatgtgttatctgacagtaagaacgaaaacagactgctttttgataaacagaaagcactgaaaagaattgaggagctggagggcgaacaaatcaaaaccgcccgcagggagatggtgctggctgttgtcggcacgatgaaagcaggcaaatcaaccaccatcaacgccattgtggggcaggaaattctgcctaaccgtaaccgccccatgacctctgtaccgacgctcatccgccacgttcccggaaaaactgagccggttctccatctggaacatattcagcctgtccgcaatttattaatcacactgcaggaaaaactcgccaccccggcaggacagcaggtcgcacagaccctgcagcaaaccggggatacccgcgaactgctggatattctgacggatgatggctggctcaaaaatgaataccacggggaggaggaaatctttaccggactggcatcgttaaacgatctggttcgtcttgctgcggcaatggggactgaatttccttttgatgaatacgcagaagtgcagaaactgccggtgatcgacgtggaattcagccatctggtggggatggatgcatgccagggaacactcacactgctggatacccccggccctaatgaggccggacaaccgcagatggaagtgatgatgcgggatcaactgcagaaagcctctgcggttctggctgtgatggattacacccagatgaactcaaaagcggatgaagacgtccgtaaagagcttaatgccattgctgacgtatcagccggccgcctgtttgtactggtcaataaatttgatgagaaagaccgcaatggcgatggggcagatgccgtacgccagaaagttccggcaatgctgaacagcgatgtgctgcccgcctcccgcgtttatcccggatcctcacgccaggcatacctggctaaccgtgcgcttcatgagttacggaaaaacggaacccttcctgttgatgaagcctgggtcgatgattttatcagaggtgccttcggttgcatgaaaaaagaatacgtctgtaaagacagtgaactggcaactgaaggggcgacagacctgtgggaaggctcacttatcgatcaactgataacggaagtcatacagagctcacattccagagctgcggcactggcggttgactctgccgccgcaaaactgattcagaatgcagaaaatatcagtgaatacctgttgttacgccatcaggggctacagcaaagcattcagtcactgcagtcgcatatcaccagcctgcttgcggatatccgggaaatcgcggactgtcaggagcagatgaccactgatgtcagaatggccatggaggagatcgatactaaaacccgggaattactgacgggggtctgcacctcactggaagaggagctgaatgactatttcagaagcggtaaacgcaaagaacagcaaatgctggaggaagaagacgcagaacaacgaaggtctcagtccggattatgggggaaaatttctcaatggtccggtatcaacaaccagggccgggaggattacaggaaacgagattttgccccggacagccccgaaataaaattcagtgatcgcagggaagcccttgaactgatgacgcaaatcgaatcgaccgtgaccagcctgcaccgtgaggctgaagcacagttccggcctgagctggagaaaatcgtcagcgggattgaaacaggttttcgtggcacggccctgtacgccacagaaaacattgccggtcgcatcaatgcccgcctggaggatgagggctttaccgtaaaaatcagttttccggcagtcagccagttacagacccggctcgcggtaaaaataaatctgagtgcgcttatggaggaaagaacggagaccgtcacccgtcgccgtcggcagagtggcgtatggggaaccgtttgtcgatggtttggcaccagtgacctgggctgggaaaactatgacgaggatgtgagtcgcagcgtgatcaatatcaacaaggtcagagaggaagttatgtcactgacccgggcatatttcggggagctgcaggcatccattgagcaggatattaaccagcccgtccgccaggaaatcgatgcctttttctgcgcattcagggagaaagttgaacaactgcgtaacacgctgattcagagctctgaagatcataaacgcgatcagcaggcgcaggaacggcttaccgggcgacttcaggcattaaatgaaagggttcctgagctcattactgacagtaaggcgctgagggaagagctggagacaatgctgtgacttcaccatttattcaacaaattgctgataaccgggtatgtcaggtactcacctgtcttcctgaaaaatttgtggttgatttcgcaaacggaatcgatgttgcacaggagcatatccgcacggccggagagcgcacgttcttccggcgtttaaaagaggggctgaccggcgaaggcgctgcacggcagaatgccatcaatgcgtcgcttgcacagggcgttgaggcgtccctgcgctggctgacggagatgacaacgtcacttgccaccacaaactacgcgattacccgggtaaacgacagggtcagttcactggtcagtgatacagccaggctggcgcattattccgcagatacgcgggagcagttactcaccctggccgatcaggttcaccataaactgaatcatcttgaagaaaaactccaccgtgttgaccaggttcagcgggcgcagttacatcttgagcagatattctcatggtggagcgccgggcgatatgcgtcattttcccctgccggacgttgttatgtggcacttgaagagcttcgctggggcgcgtttggtgatgtgatacgtcagagcgaaacaggccaggttaaccagctactggatattctcagacataaagcattaacgcagatggcacaggagagtggcggtagtgcaaccgtgcgtctgaacactctggactggcttggtggtcagggccgggagcaggcagataacgagtggcatgacgcgattaactggctgggagactggtgcagtgaagagcagcatccggtgatctggtcaaccacgcaggctgcagaacacttaccggttcgcatgcctcgcctctgctctgcagaacgcctctctgaaagtatggtcgatgaaatatttcagaagggggctgcatgagtacagaaatgaaaacggggctggtgctgtccggtggcggggcggtgggcgcttatcaggcgggagtggttaaggcactggcagagtgtggtacacagatcagcatggtttcaggggccagcattggcgcattcaatggtgccattatcgcggcctctcccgatctgtcagaagctgccgtacgcctggaggcgctctgggatcatctggggaataatcaggtgctgtcggtaaacagattggtttacttttcattgctgaaaaaattgttccaggcaatgaacctctgccagatccccggacgtgcaggagcactgcttacgacgcttcttcgccatatatcgacaatcaacgggtttgacaatctgatggctcagccgttgttgtcagatgagcccctgacagcgctgatggatcattatcttgatactgatgctctggcagacgggctaccgctgtatgtgtcgctgtaccccacagaagggggcatgcaggatattattgactgcattcgtgctgaactgggtgtcggaaccacgaaaaacgccgtttttcagcatatccagagcctgccccgcggacagcagaaagaggctctgcttgcgtcagccgcgctgcccctgctgttccgtccccgtgaggttcaggggacaatgttcggtgatggtggtatgggaggatggcgaaatatgcagggaaatacccctgtgacgcctctggtcgatgccggatgcaatatggtgattgtgacgcatctgagtgacggttctttatgggatcgccaggcttttccggacaccacaatccttgagatccgtccccggaaaaggctgaaatatgcaggtgatggtggcaacagcggcggtctgctcagttttacatcggcacataccgacgcctggcgtcagcagggctatgaagacacgatgctggcgatggagcatatccggaaaccgctggcagcacgtcaggcactgacccggtcagaggcggtattgcagaaaagcctggatataacggaagaggcagatttggcactgagaaacgcgatggcccggattaaataaagacgccccaaagaaacgccaccgcctgtggtggtgtttttcctgtctggtgttattgaaaatattttcagatatatattacctgagagaaagttttacccctcacctgtcaattcactcactggaaatttaattatgaaattacctgtaaagttattaatgagccttatatctctggtcagcgttattgcacgtgccggggaatataaaaattacagccgggatgaaataaaatactggcgatatacatcatacaagggggggaaacttccggaaggtttcactgatgagaaattttccagcgccatttacaacggaagaatatttacaatgaaacgtttacatacccttatgttatttctggcggttctgttcacgggctttaactttaacgcagaagcggctaccgtaaaacaagctcttagttgtaacccggaagcctgggctgaacaacctggagcgtgtccatcaacgtacgagttgtacgaaggtgacgctacctacaaagccgctatcgacaaagcattaaaaccggtcggactgagcggcatgttcggtaaaggcggctatatggatggccctggtggaggtatcacgccagtaaacattaacggtacagtctggctccagggcgacggttgcaaagccaatacctgcggctgggactttatcgtaacactctataacccaaaaaaccatgaagttgttggctaccgttactttggtttagatgacccggcctacctggtttggttcggtgaaattggcgtgcatgaattcgcgtatctggtgaaaaactacgtagctgcggttaactaatttaaggagtctgtcatgaaaacttttatcaaaactttactcgttgctgtaactattctgttctctgtcttcgctactgcgaaacaagtaaaactgccaaataacatcaaatacgttaatactacagaagcgttttcctgtaccgaaattgacggtatgaattgccagacaaagaatcagttcaactataaagataacagctatgttttcgtgcttgaacgtggtggggcctggtgctacgactacactgtctcggtagttaacctgaaaaccgggaaagcacaaatgattgaatacggggacaatcaactgtgctcaggtagcaacaaaccgttcttcgaaatcaaaaatggcgtaccgacggtaggagtcatcgacacatccggaaaacctgtcgttgtagcccaggacaaacttaaaatctaaggagtaaaccatgcgtttctctgcacattattaatatcaaaggtaaatacagccccagccattgttaccggaaagccgcttaatgcgtggctcgccagtgaaaggcctctcagacaataaaccttattcatttcacccgtcaggccgcgtcttctccgggagacgcggcttttttcatttattgcaccagtaaatcttaaccaccgataaggagcaaagtatgcgattagccagtcgttttggttatgctgcaaaccagatacgccgtgaccgtccgctgacacatgaagaactgatacgccatgtacccagtatttttggggaagaccggcacacctcccgcagtgaacggtatgcgtacattcccaccattaccgtcctggaaaatctgcagcgggaaggctttcagccgttcttcgcctgccagacccgtgtgcgcgacccgggccgccggggatacacaaaacacatgctgcgtctgcggcgggccggagagataaacggagaacatgtccctgaaattattctgctcaactctcatgacggtacctccagctaccagatgctgccgggttacttcaggttcgtctgccagaacgggtgcgtctgtggccagtctctgggggaagtgcgtgttccacaccggggaaatgtagtggagaaagttatcgaaggggcttacgaggtggtgggcgtgtttgaccggatagaggagaagcgtgatgccatgcagtcgctggtcctgccgccaccggcacgccaggcgctggcacaggcggcactgacttaccgttatggtgacgaacatcagcccgtcaccaccgccgacattctgacgccgcgacgccgggaggattacggtaaggacctgtggagcgcatatcagaccatccaggagaatatgctgaaaggcgggatttccggtcgcagtgcaaaaggaaaacgtatccatacccgggccattcacagcattgataccgacattaagctcaatcgcgcattgtgggtgatggcagaaacgatgctggagagcctgcgctgatgccgtttccctgagtgagggaatcattcagctttcgttcctgaaaaacacacatttatttgttatttaaggagttatctcatgaaaaccgtttctcagaatacccccacaatttattcagctacaacaccagagaataatccgcctcagttggttgccagcctcgtccctgatgaacagcgcatcagcttctggccgcagcattttggcctcattccacagtgggtgaccctggagccccgtgtcttcggctggatggaccgtctgtgcgaagactactgcggtggtatctggaatctgtacaccctgaacaacggcggggcatttatggcacccgaaccggatgacgatgatgacgaaacatgggtactgttcaatgccatgaacggtaaccgcgcagaaatgagcccggaagccgccggtattgccgcctgtctgatgacgtacagtcatcatgcctgtcgtacggagaattatgccatgacggtccattattaccggttgcgggattacgccctgcagcatccggaatgcagcgccattatgcgcatcatcgactgaatggagagaagcacaatgcaacaactttcctttctgcccggagagatgacgcccggcgagcgcagcctcattcaacgggccctgaaaaccctggaccgccatcttcatgaacccggcgtggccttcacctccacccgtgcagcacgggaatggctgattctgaacatggcgggactggagcgtgaagaattccgggtactgtatctgaataaccagaatcagctgattgccggtgaaaccctcttcaccggcaccatcaaccgcacggaagtccatccccgggaagtgattaaacgcgccctgtaccacaatgccgctgccgtggtactggcacacaatcgacccgtccggtgaagtcacacccagtaaggcagaccggcttatcaccgaacgtctggtacaggcactgggcctggtggatatccgggtgccggaccatctgatagtcggtggcaaccaggttttctcctttgccgaacatggtctgctttaacccttcacaaccacatcacacctgtttttcactttttatcttctgtcttcagaggtatcccattatgaaaaattatcacccgtggtgaagccatgcgtattcaccaacaacatccgacatcccgtctttttccgttctgtaccggtaaataccgctggcacggcagtgctgaagcgtataccggtcgtgaagtgcaggatattcccggtgtgctggccgtgtttgctgaacgccgtaaggacagttttggtccgtatgtccggctgatgagcgtcaccctgaactgagtgggaattctgatgagcagaattatcgccactaccggaccattcttagccgattttctgtaaggattttatcgtgtcagacacactccccgggacaacacttcccgacgacaatcacgaccgcccctggtgggggctgccctgcaccgtgacgccctgtttcggggcacgtctggtgcaggagggtaaccggttgcattaccttgccgaccgcgccggtatcagaggcctgttcagcgatgcagatgcgtaccacctggaccaggcctttccgctgctgatgaaacaactggaactcatgctcaccagcggtgaactgaatccccgccatcagcataccgtcacgctgtatgcaaaagggctgacctgcaaagccgataccctcagcagttgtggttacgtttatctggctgtttatccgacgcccgaaatgaaaaattaactctccagaatagtcttctgctccggcctggtgttttcaccacgccacttttccatttttatatctgcatatcaggaaaatcttcagtatgaaaacattacctgtattacccgggcaggcggccagttctcgcccgtctcctgttgaaatctggcagatactgctgtcccgactgctggaccagcactatggcctcacactgaatgacacaccttttgccgatgaacgtgtgattgagcagcatattgaggcaggcatttcactgtgtgatgcggtgaactttctcgtggaaaaatacgcgctggtgcgtaccgaccagccgggattcagcgcctgtacccgctctcagttaataaacagcatcgatatcctccgggctcgcagggcgaccggcctgatgacccgcgacaattacagaacggtaaataacattaccctgggtaagtatccggaggcgaaatgatgacactggaagccgacagcgttaacgtacaggcgctggatatggggcacattgtcgttgacattgatggtgttaatatcactgaactgattaataaggccgctgaaaacggttattcactccgcgtggtgaatgaacgtgacgctaccgaaacaccggcaacttatgccagccctcaccagttgctgtaagacaatgcagtgatacagggtatagtgccattaaccacagaaacagcactgttgtcctgtattaagcaggcaagagaagatgtccttaccctgcgccatctgcagcttctgcaccagaaccggtgaatctcactcaacaggcttcatttctcctgacgccagcctgaatacagctggcgttttcatttataaacagaacggaaaaccgataataatggaatggacgccccgaccatgaagcaacggtaggatattactgataaaccttccagtggaggtgcgttatggccgttttaacgattagcattgacctgacaaaaaatgaattccaaatccacggtctgggtaggaacagaaaaatctaagctcagaaaacggattaaagtaagcgtcaacggagcaccgtattgacgcttatttattggtgagaactacgttccatggcaggagttcgtcaacacggttggagggccattccggcagtatgctcagaatatggcgcagatacgcttccggatcgataccgttcagacggcaggtgcctgcttttctggcaacaagcaggaatctcagcgctgaagcaggaattagaggtaaaaacgccctaccgggccatgaatcacccggtcattggagtagtaaccaaagcagatttagccagcatggaacaaatatctttggtgaaaagttggttacgggaagctggagcgcacaacgtgttagtaaccagtgcagttaataacaatggagttacagaactttttgccttgctgcatacagaagaaggctgttgttaatttcgattggttctcggatgagaatgatgacggtgatacacagataagaatcaatgagcaatgagggttgccgggcaaccctcattgaataaaacgggaattacttcgcttcgccgtttttcatttcgcccatagctttcagctttttggagatatcgcggcgttctttggagagctcggcatttttgatgatgtaatcgtcaacgcgatcttcatagtcacctttcatgctggcgatgatgccctggattgcttcaacgctcatccccggcttgatgtaatcgctcaggttgtccagcagcaggacgcgcttctggttgtcacggatctttttctcaacgtcctgaatttcacgttgcagtttgttcttacgacggaacagacgaacaaattccagtacgtcctggaatgaaggcttggtagtttccatttttatacccctgataatgtgagagtcggattcgtttaagcaaccgctattcgttagggccaacattactcatagctgccgcagatgacaatgcttttatcccttttcactatcataccctttatccttgctgaatcgaagcagcagcaagatgattctgaagttcaggaattatttgcgcaaggcccggcaaatcagattcgatagcaactcaagctgatgcgccgtttccatgttcagccacacataaccatagattggtgtttccacaaccttcaggtcatggtggttattgagcaactgacgcagctcttccacagcatcgttcaatttttccgtattggcaaaaaccggctgcggattaccttcgtacagcgcatgaacaaggctcagcagtatttgctgcatcatgtgttgggtatcacgaagtttttgcgcgttcaataacacgaaatggctggggcgcgtggcccagtatgcattgatttgcaactccagcatacaaaccagattgcggttaatggtctggataccttcatatatcgattttggaatacgggtttctttgctggcgggcgcaatcagtccacgcattttcacggcatcggtcaggagtttttgtagatggctttccagacgtgggcgttcgagtaagttcggtgagaatgcagattgatagacccgattatactcggtcagacttttcgccagttgaatgcgccagtggatgaacgcccgttgtggccagataccggtaaacaacattgccagtaaagagccgaggatcacatcgccgcttcgccataacgccgtatcaatttcacctgtcggggaacccacaacaattgccagcgtcaccccaatcaataaaccttgatacggtttcttgcccagcgccagccaaccgcaaaggaacatggccgccgcgcaccagactaacatcagcggtaacgagattaactccagttgcagagcgataagacctaaaatcgaacccaacaccgtaccgccaatacgctcaaaggcgcgagggacaacgttaccccagaacgagattggccccataatcaccaccatggtgaccagcggccaggtgctttccgggatagtaaacaggcggataatgagaaaagtgagcaggaatgccagcgcgacccgagtaccatgcacaatgcggtaatggcggtatacccggatttcaaacgggcttaatgacttatcggcacgcacgcagaaactccgtaatgagattaaaagcgctcataactcatctgtcggccagaaggcgcgcctctgaattatccgacggacaaaccgggaacagtgtaatttcccggcaggagcgaaaaaaatgaaaggcgcatcttactcttttcgctttcaaaaaaaagagtggtcatcgcgttaacacaccgccctgagatgaattagtgatgttttggctgcaccgcaacatacatttcgatatcccagtacccatcttccgcgccattgttcaaataaacctcgaagcagggctttggtaacatttcataagcactgtcctgcaagagactattaaagaactgataccagggtttagcaaaatcatcaccgactacacgagctaccgccaccgcatactgaccacctgtaatttctgtcagaatgacgccctcactgttttcgggaagcgtaaagtaacccggcaccgtcacgacggtgtcgcagcgtaatttttcggcgggtgtttcatctggattgtcgtaatagacagcaacccactccttcggcacaatatttttgctatctacccacatcatcaactgctcaaagcctttctttaccgtctgttcccacgggccaacgagatggaaacctgcaacggtacgtttctcttcctgcttaatctcgtagttcatgacgcctccattgacactgtttttatatacagtatagttgcaaaattaaaaccacaaggaatgagtgttgattatgcgagcagactcgcactcctgccagtctgctgcaaaagaaaggtcaggccttatggtggaaataatcactcaggcgagaaaacatgctgccttccccgacagattccagggtaaccagcggccagtgcgccacctgtttatcacggtcgtaaagttcaatttcccctacccgctgatgggcgctaattggcgcggtgagttctttaccatcaagggtatatttggctttgatatgtggaatttcggctttcggtagcaccatccagaactcttgttccgttcccaggtcgatattttctttatcgccataccagatgcgttccgttccgacctttttcccacggtgcaaaatttgcaccgtagtaaagttttgttgcccccaacgcagtaattttcttgcctcttcctcacgaccttttgcactgtcagcccccattaccactgcaatgagacgacgctgcccatctacagccgaagcaatgagattaaacccggcaccagaagtatgacccgttttcaggccgtcaacattcatggttttatcccacaacaacccgttacggttttgctgggtgataccgttccaggtgagacttttctcactgtacatatgataaaactcgggctcgccgtggatgatagcacgagaaagcacagctaaatcataagccgagctatgctggccaggtgcatccagaccatgcactgtttcaaaatgcgtatccttgagatgcagcttctcggcatagttgttcatcatttcaacaaactgccgttgcccaccggcaatatagtcagccagagcaacacaagcgtcatttccggaatccacaattaaaccacggcttaaatcacgtaccgatacgcgatcgccctctttcaaaaacatcagtgaagaaccgacaaacaccggattatctttcgcccacgcatcgcgccccacggtgacaatatcgtctggcgtaatgcgatgactatcgatagcgcgatccacgacataacccgtcatcagctttgtcaggctggcgggattgcgctgttgatgctcattacccgcggtgaggatctgaccggtggtgtaatccatcaatacccaggacccggcatgaatctctggaggctgaggtgaaaaaggaatgttttccgccgcaaaaccagacgataagttaaaaacgaacaaagaagcagcaataataagacggcgtttcaacagcaaaccctcaggagtttcaaatagctgttctttttacggaaatacttatgaactggctggaataaagtgcaagaaaatgtgactaccctctcatttttatctgacatgatctgttgccactcgctgccaaattgtggcgctaaagctgattagcacggtgatatttgatactctggcagacagcagaaataacggatttaacctaatgatgaatgacggtaagcaacaatctacctttttgtttcacgattacgaaacctttggcacgcaccccgcgttagatcgccctgcacagttcgcagccattcgcaccgatagcgaattcaatgtcatcggcgaacccgaagtcttttactgcaagcccgctgatgactatttaccccagccaggagccgtattaattaccggtattaccccgcaggaagcacgggcgaaaggagaaaacgaagccgcgtttgccgcccgtattcactcgctttttaccgtaccgaagacctgtattctgggctacaacaatgtgcgtttcgacgacgaagtcacacgcaacattttttatcgtaatttctacgatccttacgcctggagctggcagcatgataactcgcgctgggatttactggatgttatgcgtgcctgttatgccctgcgcccggaaggaataaactggcctgaaaatgatgacggtctaccgagctttcgccttgagcatttaaccaaagcgaatggtattgaacatagcaacgcccacgatgcgatggctgatgtgtacgccactattgcgatggcgaaactggtaaaaacgcgtcagccacgtctgtttgattatctctttacccatcgtaataaacacaaactgatggcgttgattgatgttccgcagatgaaacccctggttcacgtttccggaatgtttggggcatggcgcggcaataccagctgggtggcaccgctggcgtggcatccagaaaatcgcaatgccgtaattatggtggatttggcaggagacatttcgccattactggaactggatagcgacacattgcgcgagcgtttatatactgcaaaagccgatcttggcgataacgccgccgttccggttaagctggtgcatatcaataaatgtccggtgctggcccaggcgaatacgctacgcccggaagatgccgaccgactgggaattaatcgtcagcattgcctcgataacctgaaaattctgcgtgaaaatccgcaagtgcgcgaaaaagtggtggcgatattcgcggaagccgaaccgtttacgccttcagataacgtggatgcacagctttataacggctttttcagtgacgcagatcgtgcagcaatgaaaattgtgctggaaaccgagccgcgtaatttaccggcactggatatcacttttgttgataaacggattgaaaagctgttgttcaattatcgggcacgcaacttcccggggacgctggattatgccgagcagcaacgctggctggagcaccgccgccaggtattcacgccagagtttttgcagggttatgctgatgaattgcagatgctggtacaacaatatgccgatgacaaagagaaagtggcgctgttaaaagcactttggcagtacgcggaagagatcgtctaatttgaagcctccgccgctggtacggcggaggacaatgttgagtcaggctttttgaacggtgatgctccacgctgcatcgccaatctgctgataatcggtgatggcatgtccttcttctgccgcccactgtgggattgcttcagttgcctgggtgcaatcaaactcaattaccaactcatcgccgctggccatttctgccagtgctgcttttgcttctatgagtggaaacggacagacctgcgtcaccacatccagctttttaatcgccatctttacaccttacttaatttgccgcagcagtcgccagtcgtgccttacgctgtggtcgtacatacacaagccaggacgcagtccagactccgagaatcataaatacaaggccaatccagccctgccaggtcatcattgcagtcatgaccagtccattaccgatagagcaaccacctgcaatgctggcaccgaagcccataagcacaccacctaacccgctacgtactgttgtttgtgcatcagctgcgcgaacgcggaactcacggctcgctttggctgcaataaatgaccccacgaagatccctaacaccaggaaaacgccccagttaatgtatttcacgtcacctgcgaccagaaattgcagaatattggccgttggggaagtgattcctaacccaaacatgcgtccggttgcttcactcaggggccaggctaaaagcgcaatcaaaccgatgagtacagcagtgacaaagggatgccagcgtttttcaaacagaatatgagcgatcccggttcggcgcggcggtaaggtcgcgactttgagttttggcttcttcaactctttcatcaccacccagagcgttatcaccagcaaaacggtaaccaacggccacacagacaaattaaaagtctcagcaatagagttatgttcagtactgtagtgctgcaaggtttgatttaaaccactggcatgtggagaacgcatcaccgcactcatcaccatataagtgaaaagcgcgatccaactgccgatcaatccctcacccgcgcgataccaggtcccggtggcacatccacccgccagaacaattcccagcccgaagatatacccacctataacagtaccaagccacgggaacgccccggcttcgtaagtcagtaggcccgcctgaattaacgcaaaaacccccacgctttgtaccgaaattgcaatcagcaaggcgtaaaacatgcgattatttttcgcgatatacatatcgcgaaaaccacctgtcaggcaaaaacgcccacgctgcatgacaaatcccagcagagcaccacaaattagcccgcttaatatcattgaaaacataaattaattaaccagatgaatgttaatagggaaattattcatgactggtggaatgcagaccaataaccaaattctctaaattagaacaaatggttataaatgaggatttcgataaaaaagaataaaaaaaccggagccaaataatcattcgactccggtttattattagaaaagatgattatgcaacgtcttcgtactgcggaaccgggttacggaagctcttggtgacgcaagccaggtaaatcagaccgatagccgcccagatcagacccagaaccattgagctttcttccaggttaacccacagcgcaccaacggtcagcgcaccacacatcggcaggaacatatactggaagtgatctttcagcgtcttgttacgcttctcacggatccagaactgcgagataaccgacaggttaacgaaggtgaacgccaccaacgcaccaaagttaatcagcgccgtagccattaccaggtcgaagttgattgccagcagggcaatcgcgccaaccaggatgatgttcatcgccggagtacgccatttcgggtgtacataaccgaagaagcttttcgggaatacgccgtcacgacccattacgtacatcagacgcgcaacacctgcgtgcgccgccataccggacgccagtacggtaatggtggagaagatcagcgcaccaacctggaatgctttacctgccacgtacagcatgatttcaggctgtgacgcatccggatctttaaagcgagagatatccgggaagtacagctgcaggaagtaagttgcaaagatgaagatcatgccgccaatcagcgcggtcaggaaaatcgcacgcgggatcacgcgctctgcatctttggtttcttccgacaggttgctgatgccgtcaaagccggtaaaggagaagcacaggattgtcgccccggtaatcatcgggataacatgcgcatcgccagaccagaacggacgagtgctcgccagcgtaccagcgccttcaccttcaaatacgccataaacaaccatgcccagaatcaccgcgatcagcactacctgcaacacgacgattacagtgttgaagttcgctacggatttcagactacgcaggttaaaggcggtcataaaggccaccagcgccaccacaaacatccacgatgggatggaaggcaccagagcttcaaaataaattttcgccagcagaatgttgatcatcggcgcgaacagatagtcgagcagagaagaccaacccaccataaagccgacagtcgggctaatggatttctgggcgtaagtgtatgcagagccagcagaaggatagcggcgaaccagcttcccgtagctcagagccgtaaacaggatcgcaatcaatgcgaacgcataggctgtcggcacatgaccatccgtgaggcctgaaacgataccaaaagtatcaaacagcgtcatcggctgcatataggcaagacccatcattacaaccggaactaacgtaagcgttttacgcaattccacgcgagaggtgtttggagtaacgttatgcgacatggtcattctcctttacggtgataaccgtcgcgtaagcaaaaaattgccccatttttttggattcctcagcgacaacaactgtcgatttttagtaaatatctatccggtacgaagcccggcctcttggtatgaatgattggtttgaagcaaaaaataaccgacgctgatgaaacgtcggtttttagtcattttttgacagcggcgcattgtgcctaaatgggggggaaatgacaagagaatgagaggcttgtcataataatttttctttaaatggctgattttccgtcatcagattttgcataaacaccggcgatcgcactatttgctaaaatttcatctcgccaccagccgctggcaaggcctgcggtctgttcgttccagccaatccagacgggttcaaagagagtttgggcgaccactttcttctcgattaacgcgccactatcgagaaaacgttgcgccagataacggggtaaatagccgcagccgaggccgctaatttgcagctccagtttggttttaaaatcgaaaacggtaatggcttcttgttcgtcgagaagttgtgaggccgtagaagcgcctgcctgcgcagtatcccccaccacaatcgcccgatatcgcttaataatacgacgatttaacggctcttcttccagggctaacggatgatgaggcgcgaccgcaaagacttgttccagatcgcccaaccgtgaaaaaccaaactcactggaagatggtggctcatgcatcgcgccaacaataatatccgctcgcccctgagtcagggcatcccatgaaccaccgagtacgccattgataaacttcaggcgcgtcacgctatgatgttgataaaaagcttcaatcagtggcgcaagcagagaaaaaggaaacgtgtcgtccacgccaatcaccagctcgttttcccagccttcatgcagtttgatcgcctgcttttccagttcccgcacggtatgcagaacttcccgccctttctctaataacatttttccggtgcgggtgaatttagcgcggtgaccgctacgatcaagcaattgaatattaaggtcgctttccagcttgtgaacggtgtaactcagagcggacggcgtcttgtagagtttggccgacgccgccgcaaaactgccttctttttctaaggcatcgaggatcatcaacacatccagcagtggtttcatacacgcccccttgcagtgtatgcggcgtcctgctggcgtgatcgtttactccagcggcattaccagcggatcgggatactggtattcaaatcccagttcattacaaatccgactgccatcaataatcttacctttgccgctgtccagactatttctgaactgcggaggttccagccccagtaaacgggccatctgcggatagaaaacattacgcgcagggtgagctggcgcacatatattatagatgtgtccgcctttaggtgcctgtaacaacagagtgatagcgccaataacatcttctaaatggactaaattaacaccatgttcaccatcaggcgcggtttttccggcaaagaagcgtccgggatgacgccccggtccgaccaggcccgcaagacgcagaatatcgaccgaagtaccgggtaaattgtgcagccagtcttcgagttcttctaatactcgtccactgttggttaccggattacgcggggtagtttctttcaacatgccttgcgcatcgccatagacagatgttgagctggtaaaaataattcggggaatacgatgggccagcgcgctatccactaactcttgtaccgcttgtaaatagaactcatcgccggagccgctacgacgtgccggaagcgtaatgaccagtgcatcggcatccatcagggcatccagatcgtcagaatcgcaaactaactcaggctccatgcgaagcagatagctatcaatgccactcattcgggccgcttcgacaccatcttgtgtggttttactcccggtgacttgccagcctcgcgctgaaagtgacatcgccagcggcatgcctaaccaccctaacccgacaattgcgacctttttcatccgttatctcctgatacaccttagatctataaggctacgctagcgtatcaaaactgacaattcattctatgaatgaatctgttcaataatgataacgacatgctgcaatgagcagtgaatcgtcggtaaccgcgtataccagacggtgctcctctgtaatgcgtcgggaccagaaacctgacaaattatgtttcaggggttctggcttccccttaccttcaaatggcgttctgcgggtatctttgataagttcattgatctttttaacaattcgcttatctgtttcctgccagtacagataatcatcccatgattcctcagaccagattagtttcactcaataatgtccttttctgttcctttgcctgatttcaggctatcgattgagtccatcaatctccgggcgttagcgggggaacgcagtagataagccgtctcttccagcgagttgtattcttcgagtgacatcagaacacaagcctctccattctgacgagtaataaggatcggggcatgatcttcaacggctttcatcattgttgccgacaaattctgacgcgcttcgctgtagctaattgtacgcatgtcaatctcctcttttgtacagttcattgtacaatgatgggcgttaattaactatttattaattagtttgtagatcaaggtattgtcagtgagacgaaaatccaggcttcgctatttttggtgccgtcagcttagaggacagtcctcttagccccctcctttccccgctcattcattaaacaaatccatcgccataaaatatataaaaaagcccttgctttctaacgtgaaagtggtttaggttaaaagacatcagttgaataaacattcacagagacttttatgacacgcgttcaatttaaacaccaccatcatcaccatcatcctgactagtctttcaggcgatgtgtgctggaagacattcagatcttccagtggtgcatgaacgcatgagaaagcccccggaagatcaccttccgggggcttttttattgcgcggttgataacggttcagacaggtttaaagaggaataagaaaatgacagacaacactcgtttacgcatagctatgcagaaatccggccgtttaagtgatgactcacgcgaattgctggcgcgctgtggcattaaaatcaatcttcacacccagcgcctgatcgcgatggcagaaaacatgccgattgatattctgcgcgtgcgtgacgacgacattcccggtctggtaatggacggcgtggttgacctcgggattatcggcgaaaacgtgctggaagaagagctgcttaaccgccgcgcccagggtgaagatccacgctactttaccctgcgtcgtctggatttcggcggctgccgactttcactggcaacgccggttgatgaagcctgggatggcccgctctccttaaacggtaaacgtatcgccacctcttatcctcacctgctcaagcgttatctcgaccagaaaggtatctcttttaaatcctgcttactgaacggttctgttgaagtcgccccgcgtgccggactggcggatgcgatttgcgatctggtttccaccggtgccacgctggaagctaacggcctgcgcgaagtcgaagttatctatcgctcgaaagcctgcctgatacaacgcgatggcgaaatggaagaatccaaacagcaactgatcgacaaactgctgacccgtattcagggtgttatccaggcgcgtgaatcaaaatacatcatgatgcacgcaccgaccgaacgtctggatgaagtcatcgccctgctgccaggtgccgaacgcccaactattctaccgctggcgggtgatcaacagcgcgtagcgatgcacatggtcagtagcgaaaccctgttctgggaaacgatggaaaaactgaaagcgctgggtgccagttcaatcctggtcctgccgattgagaagatgatggagtgatcgccatgagctttaacacaatcattgactggaatagctgtactgcggagcaacaacgccagctgttaatgcgcccggcgatctccgcttctgaaagcattacccgcactgttaacgatattctcgataacgtgaaagcacgcggcgatgaggccctgcgggaatacagcgcgaagtttgataaaaccacggttaccgcactgaaggtgtctgctgaggaaattgccgccgccagcgaacgcctgagcgacgagctaaaacaggcgatggcggtggcagtgaagaatattgaaaccttccacactgcgcaaaaactgccgccggtagatgtagaaacgcagccaggcgtgcgttgccagcaggtcacgcgcccagtcgcttcagttgggttgtatattcctggcggctccgccccgctcttctcaacggtattaatgctggcgactccggcgagtattgcgggctgtaaaaaagtggtgctgtgctcaccgccgccgattgccgatgagatcctttatgcggcgcagctgtgcggtgtgcaggacgtgtttaacgtcggcggcgcacaggccattgccgcactggcgtttggtacggaatctgtgccaaaagtggacaaaatcttcgggccgggtaacgcctttgtcaccgaagcgaaacgtcaggtgagccagcgtctggacggtgcggcgatcgatatgcccgcaggcccgtcggaagtgctggtgattgctgacagcggcgctacgccggatttcgtggcttctgatttgctctctcaggctgaacacggcccggactcacaggtgattttactgacgcccgctgctgatatggcgcgtcgcgttgccgaggccgtcgaacgccagttggcagaactgccgcgtgccgaaaccgcccgccaggcactgaacgccagccgcctgatcgtgactaaagatttagcgcagtgcgtggagatctccaaccagtacggcccggagcacctgatcattcagacccgcaacgcccgtgaactggtcgatagcatcaccagcgccggttcggtatttcttggtgactggtcaccggaatcggcaggtgattacgcctccggcaccaaccacgttctaccgacttacggttacaccgccacctgttccagcctcgggctggcagatttccagaagcgcatgaccgtacaggaactgtcgaaagaggggttctccgcgctggcttcaaccatagaaacactggccgccgccgagcgcctgaccgcccacaaaaatgccgttactttgcgtgttaacgcccttaaggagcaagcatgagcaccgtgactattaccgatttagcgcgtgaaaacgtccgcaacctgacgccgtatcagtcggcgcgtcgtctgggcggtaatggcgacgtctggctgaacgccaacgaatatcccacagccgtggagtttcagcttactcagcaaacgctcaaccgctacccggaatgtcagccgaaagcggtgattgaaaattacgcgcaatatgcaggcgtaaaaccggaacaggtgctggtcagccgtggcgcggacgaaggtattgaactgctgatccgcgctttttgcgaaccgggtaaagactccatcctctactgcccaccaacgtacggcatgtacagcgtcagcgccgaaacgattggcgtcgagtgccgcacagtgccgacgctggacaactggcaactggacttacagggcatttccgacaagctggacggcgtaaaagtggtctatgtttgcagccccaacaacccgaccgggcaactgatcaatccgcaggattttcgcaccctgctggagttaacccgcggtaaggcgattgtggttgccgatgaagcctatatagagttttgcccgcaggcatcgctggctggctggctggcggaatatccgcacctggctattttgcgcacactgtcgaaagcttttgctctggcgggccttcgttgcgggtttacgctggcaaacgaagaagtcatcaacctgctgatgaaagtgatcgccccctacccgctctcgacgccggttgccgacattgcggcccaggcgttaagcccgcagggaatcgtcgccatgcgcgaacgggtagcgcaaattattgcagaacgcgaatacctgattgccgcactgaaagagatcccctgcgtggagcaggtttttgactctgaaaccaactacattctggcgcgctttaaagcctccagtgcagtgtttaaatctttgtgggatcagggcattatcttacgtgatcagaataaacaaccctctttaagcggctgcctgcgaattaccgtcggaacccgtgaagaaagccagcgcgtcattgacgccttacgtgcggagcaagtttgatgagtcagaagtatctttttatcgatcgcgatggaaccctgattagcgaaccgccgagtgattttcaggtggaccgttttgataaactcgcctttgaaccgggcgtgatcccggaactgctgaagctgcaaaaagcgggctacaagctggtgatgatcactaatcaggatggtctgggaacacaaagtttcccacaggcggatttcgatggcccgcacaacctgatgatgcagatcttcacctcgcaaggcgtacagtttgatgaagtgctgatttgtccgcacctgcccgccgatgagtgcgactgccgtaagccgaaagtaaaactggtggaacgttatctggctgagcaagcgatggatcgcgctaacagttatgtgattggcgatcgcgcgaccgacattcaactggcggaaaacatgggcattaatggtttacgctacgaccgcgaaaccctgaactggccgatgattggcgagcaactcactaaacgagaccgttacgcccatgtagtgcgcaacaccaaagagacgcaaattgatgtccaggtgtggctggatcgcgaaggtggcagcaagattaacaccggtgttggcttctttgatcacatgctggatcagatcgccacccacggcggtttccgcatggaagtcaacgtcaaaggcgacctctatatcgacgatcaccacaccgtcgaagataccggcctggcgctgggcgaagcgttaaaaattgccctcggcgataaacgcggtatttgccgctttggttttgtgctgccgatggacgaatgccttgcccgctgtgcactggatatctctggtcgcccgcacctggaatataaagccgaatttacctaccagcgcgtgggcgatctcagcaccgaaatgatcgagcacttcttccgttcgctctcatacaccatgggcgtgacgttgcacctgaaaaccaaaggtaaaaacgatcatcaccgtgtagagagtctctttaaagcctttggtcgcaccctgcgccaggccatccgcgtggaaggcgacaccctgccctcgtcgaaaggagtgctgtaatgaacgtggtgatcctggataccggctgcgccaacctgaactcggtgaagtctgccattgcgcgtcacggttatgaacccaaagtcagccgtgacccggacgtcgtgttgctggccgataaactatttttacccggcgttggcactgcacaagcagcgatggatcaggtgcgtgagcgcgagctgtttgatctcatcaaagcctgtacccaaccggtgctgggcatctgcttagggatgcaactgctggggcggcgcagcgaagagagcaacggcgtcgatttgctgggcatcatcgacgaagacgtgccgaaaatgaccgactttggtctgccactgccacatatgggctggaaccgcgtttatccgcaggcaggcaatcgcctgtttcaggggattgaagacggcgcgtacttttactttgttcacagttacgcaatgccggtcaattcgtggaccatcgcccagtgtaattacggcgaaccgttcaccgcggcggtacaaaaagataacttctacggcgtgcagttccacccggagcgttctggtgccgctggcgctaagctgctgaaaaacttcctggagatgtgatgattattccggcattagatttaatcgacggcactgtggtgcgtctccatcagggtgattacggcaaacagcgcgattacggtaacgacccgctgccgcgcttacaggattacgccgcgcagggtgccgaagtgctgcacctggtggatctgaccggggcaaaagatccggctaaacgtcaaatcccgctgattaaaaccctggtggcgggcgttaacgttccggtgcaggttggcggcggcgtgcgtagcgaagaagacgtggcggcgttgctggaagcaggcgttgcgcgcgtggtggtcggttccaccgcggtgaaatcaccagaaatggtgaaaggttggtttgaacgtttcggtgccgatgccttagtgctggcgctggatgtccgtattgacgagcaaggcaacaagcaggtggcagtcagcggctggcaagagaactcgggcgtttcactggaacaactggtggaaacctatctgcccgtcggactgaaacatgtgctgtgtaccgatatctcgcgcgacggcacgctggcaggttctaacgtctctttatatgaagaagtgtgcgccagatacccgcaggtggcatttcagtcatccggcggcattggcgacattaacgatgttgctgccctgcgtggtacgggcgtgcgcggcgtaatagttggtcgtgcattactggaaggtaaattcaccgtgaaggaggccatcgcatgctggcaaaacgcataatcccatgtctcgacgttcgtgatggtcaggtggtgaaaggcgtacagtttcgcaaccatgaaatcattggcgatatcgtgccgctggcaaaacgctacgctgaagaaggcgctgacgaactggtgttctacgatatcaccgcttccagcgatggccgtgtggtagataaaagctgggtatctcgcgtggcggaagtgatcgacattccgttctgtgtggcgggtgggattaaatcgctggatgacgccgccaaaattctttcctttggcgcggataaaatctccattaactcccctgcgctggcggacccgacgttaattactcgcctggccgatcgctttggcgtgcagtgtattgtggtcggtattgatacctggtacgacgccgaaaccggtaaatatcatgtgaatcaatataccggcgatgaaagccgcacccgcgttactcagtgggaaacactcgagtgggtacaggaagtgcaaaaacgcggtgccggagaaatcgtcctcaacatgatgaatcaggacggcgtgcgtaacggttacgatctcgaacaactgaaaaaagtgcgtgaagtttgccacgtcccgctgattgcctccggtggcgcaggcaccatggaacacttcctcgaagccttccgcgatgccgacgttgacggcgcgctggcagcttctgtattccacaaacaaataatcaatattggtgaattaaaagcgtacctggcaacacagggcgtggagatcaggatatgttaacagaacaacaatgtcgcgaactggactgggaaaaaaccgacggactgatgccggtgattgtgcaacacgcggtatccggcgaagtgttaatgctgggctatatgaacccggaagccttagacaaaaccatcgaaagcggcaaagtcaccttcttctcgcgcactaaacagcgactgtggaccaaaggcgaaacatcgggcaattttctcaatgtggtgagtattgccccggactgcgacaacgacacgttactggtgctggcgaatcccatcgggccaacctgccacaaaggcaccagcagctgcttcggcgacaccgctcaccagtggctgttcctgtatcaactggaacaactgctcgccgaacgtaaatctgccgacccggaaacctcctacactgccaaactgtatgccagcggcaccaaacgcattgcgcagaaagtgggcgaagaaggcgtggaaaccgcactggcagcaacggtacatgaccgctttgagctgaccaacgaggcatctgatttgatgtatcacctgctggtgctgttgcaggatcaggatctggatttaacgacggtaattgagaacctgcgtaaacggcatcagtgagttactgggtaagcggatgcgatgttgttgtcgcatccggagccatagcccgatgcgcaagcttatcgggccgactattctctctgcacacgtaagctggatacatcgcatccggcaaaaaaaacgggcaaggtgtcaccaccctgcccgttttctttaaagctgcaaagattatttcgcgttgtaattacgcagcgcattacgccccagcacaatccccgcgccaaccatgccgcccagcagcaccgccagaatcaaggtaattgcctttttcgggctatcgcgacgaataggtaacatcggtttcatcacataacggtaagcatgaatatcaagatcatcaacctttaagctttcgatatccagcaggttttgacgagtctgatagtagtttggcgagaacaccaacggacgggttgcctcatgcttaatcatcgactccagcgcttcgctccccaaaaggaacaacgtatcttgtgtcacatcttcagtctgctgaacttgtggctttgtcacctgcgcctgattcgcatactgcaacgcttcctgaatctgacggatacgcagatctttctgctcctgcgcgaccacttcctgggttttcagagagtcctgcaagtttttcatacgcagcgcgatgttatctttcaggtctttttccagttcttcattgacctggtcgtcaacttgctggatatacttcgccagctgtttctgcgcaccttcaggtgtttcacccacataagaaaccgctaacggtaatgactgatttttaacggtaggctcaatggtcagcttttctgcttcttcctggttatccagcgtttccgctaatgctgagaatgcagtgctgtaacgtccgataagtgaagcctgaatgtcggagactttcggtacagctgatccgtagatcacattcatcgcgttggtataaccagcgatttgccccacatcaggttgagtaacgatagctgtggaagtccacttttctttggcaacggccagataccctatagccagggcaatagccacaatgacagaaatgatgatagtcatcttgccgcgccatagttggaccagtaaatcaatcaaatcaatctgttccgggtcatggttttgcccagaaacattattattttctactctcatcattaccctaacggacgaaataattttaagtcgccatagtttagcgataatcgccatgaatgctataggataaatgataaaaataatgaattattacaaagggaacataagagaatcagggcgaaaatcgccctgataacaagatgttagtcgctaccaaagagatcgcgggtgtagactttatctgccacatccttaagctcttctgccattcggttggaaataatgacgtcggcttgttgtttgaaggtggcgagatcgcgttccagacgagagttgaagaatgtgtcttctttcatcaccggctcgtagatgattacttcaacacctttcgccttgatacgtttcataattccctgaatggaagacgcacggaagttatctgaaccgctcttcataatcagacgataaatacccaccacttgcggtttgcgtgacaaaatggcatcggcaataaaatctttacgcgtgcggtttgcatcgacaattgccgagatcaggttattcggcacagactggtagttcgccagtaactgcttggtatctttcggcaaacaatagccaccataaccaaacgacggattgttgtaatggttgccaatacgcggatcgagacaaacaccttcgataatctgacgagtattcagacctaaactttctgcatagctatccagttcattaaagtatgctacgcgcatcgccagataggtattagcaaacagtttaatcgcttctgcttcggttgaatcggtgaacagggtcgggatattttgcttaatcgcgccttcctgtaataacgccgcaaaacgttctgcgcgttccgaacgctcaccaatgacaatacgtgacggatgaaggttatcgtaaagagctttaccttcacggaggaattcgggggagaaaataatattttcagtacgatatttcttatgcatcgctgcggtaaaaccaacgggaaccgtggatttgatgaccataaccgcataaggatttatctctactacgtctttaattactgattctacactggatgtattaaaataattagttttaggatcatagtcggttggagtggcgatgatgacataatcagcatcctggtaggcttcatttgtatctaatgtggcattaaagtgtattttatctgattgcaaaaactgctgaatttccttatcaacaataggagatatccgatcattcagcatagcaacgcgtgacggtaaaatatctaatgccacaacctcatgattttgtgcgattagaagcccgtttgacaagcctacatagccagtaccggaaatggtgatattcatttcatgctctcagaattaacttaactgtgaatcatgatgtttttagcatcctgataagagttaaaagttttaacgctacgtcgatagctggtcaacgcaacgaaaaacaattcagattttctttataagaatagctgatatttattaagttaatattaagcagtgaaatttagtctataagataattggcaaaaaaaagcccgatgcaatatacgccgggcttcaattttattgttggttaaatcagattaatccagccattcagtatggaacacaccttctttatcaatgcgcttataggtatgtgcaccgaaatagtcacgctgtgcctggatcaggttcgcaggcagaacagcggcacggtagctatcgtaataggcaaccgcagcggcgaaggtcggaaccgggataccgttctgtactgcataagcaacgacatcacgcagagcctgctggtagtcatctgcaatttgcttgaagtacggagccagcagcaggttagcgatttgcggattttcggcataagcatcggtgattttctgcaggaactgcgcacggatgatgcaaccagcacggaaaatcttcgcgatctcgccgtagttcagatcccagttgtactcttcagacgcagcacgcagttgagagaagccctgagcataagaaacgattttgcccagatacagcgcacgacgaactttctcgataaactcagccttgtcgcctgctggctgcgcttgcggaccagagagaactttagacgcggcaacacgctgatctttcagagacgagatataacgtgcaaacacagactcggtaatcagcgacagcggttcgccgagatccagcgcgctctggctggtccatttgcccgtacctttgtttgctgcttcatccaggatcacatcaaccaggtagttaccgtcttcatcttttttggtgaagatgtctttggtgatgtcgatcaggtagctactcagttcaccgttattccactcggtaaaggtctgtgccagttcttcgttagagagattcaggccgcctttcaggagagaataggcttcagcaatcagttgcatatcgccgtattcaataccgttgtgaaccatcttcacatagtgacctgcaccatcggtaccaatataggtaacgcatggctcgccgtcttcagcaacggcggcgattttggtcaggatcggcgcaaccagttcataggcttctttctgcccaccaggcataatggaaggacctttcaacgcgccttcttcgcctccggaaacaccggtaccgataaagttaaaaccttcggcagaaagctcacggttacgacgaatggtgtcctggaagaaggtgttaccaccatcaatgatgatgtcacctttatcgaggtatggcttgagggaatcaatagcagcatccgtgcctgcacctgctttcaccattaacaggatgcgacgaggcgtttccagagattcaacaaactctttcaccgtatagtaaggaaccagttttttgcctggattttcggcaatcacttcttccgttttttcacgggaacggttgaaaatagagacggtataaccacggctttcgatgttgagcgcaaggttgcgccccatcactgccataccgacgacgccgatctgttgctttgacattgtttactcctgtcagggggttatggcttgcttctgaactaaattatatgccaatctttaaataatcgttcatttattaaatatcaataaagttcttcatacattttggctatggtatcccacgtgtatttttttgtagcaatttccttcattttttttgcgcagatttctgcctgttcattctgattgccatttaatatatcattgacgataaaagatagctcatttttatttttaaaataaaacgcatagttgtcagttgtaaaccgattgaaatcacaatcaaaggcaataataggaatttgaaaatgcatagcctcgactaaagaaggatttgtcccaccagctgaatgcccatgaatatagccacggcataaagacctaaagttaaaaaggatatcagaatcatatatagggtctataatttcaatattattataattcccaaattcttcttttagtcgtcgcccatacaaactggaatcccaattaccaacaatttttagactgtgtgttgtatttttaaatgcttctaatatcattcttatgttattttctggttcaatcctgcagacagtaaaaaaatagtcctcttttataactgatattggcttcttaaccaatgaatgatcaccaccataagcaataattttagcttctaaaccgtatttttttaagacatatttagcaatagcttcattatcagccacaacaacatctgaatatttaacagctattttctctgaaatttttaaataccacttagcaatacccttccattttgctcttttccattctaatccatcaatatttacaataacctttgatgacgaaaaaaatctgtaaattggtagaaaaacacaccctgaaaccccgagaattaggacaacatctaccttgttaaacaatgacaaaaataacgaatagatatcatacaagatactagaactaccattggcgtcaaatggtatatacttcaagtcagcacgcttgtatttttttggggtgtttttatatttttttcgtgaacaatatacattgtattttatattttgactttgataatcaactaaattttgaactaatgattcaaatccaccataacatgctggcaatccaacaattccaacaacatctatttttttctctgaaaattgttctgtcatactgatgaccttaatttatcttgctaatattagaaatttaactatatatctttaaataaattattcactttataccgttttctcactatatcaaagaaaactctaagacaagccatgcctaaagatatcagaaaccgaatataattcgatatatttcgcctcttccttaatatattttttttccataaaattctccctttctcatttttataatattatgcgaaataccacctcttgtgcctatttctcgaggaactgttgtatatatgctttcaaaatatttaactttagtttttgaattaatataagataaaaaatatgcataatcctctgaatatctcaaacatggattaaataaacaaactttccttttaatcactacacttggtgtaacacaaggattcaaaaaaatcaaaaaccatctaaaatgaataaacttacctactgtattaaaccaatatgatgaaattcgattatatttttcacatccatttactgcatggtagagaaaatctatatcctcatccttcagaatattcaatagccaatctatttttcccatgcaaaaataatcatctgaatctaaaaaggcaatataattaaatttagctctcctaatcccaatgttcctacaaatttgcggccccttattatatttattgcgataaatgtgaacattaaccccatacttattactcttctctaaaaatgtgtcaggagccaaatctgaacaatcatcaattacaataatctccacaagatgtggggataaagtatcaactgagtcaatagccctgattaacttttctttcctgttatacacaggtacaacaacagaaataccgaaactcctttttttcatataataatgctcacaaatggtattttgttcatatgggaggaaccacacaaccacataattgagataaagatattaatacatatcgaaagcgataaataattatatgaagacactctgccgatataatttcttatgctacagtaggttaaaagtaataataatggatatacgccatatataattcgaaaaccaagatacggaacaatagatgcgatacaacaaacaaaggtagcattaataacaatattgtttattattttatccttacaatgtgatttaatcatgacaattaaatataatacacaaagacataaagtattaattatacttatgattcgaataataaagtcctcatctgcatacggcaaatatttatatattaactttttaaactcaataacccaaggcacaacatctagaatatttgtcgcaaacaacaaaaacacacctacaacaatactaggaactacaattctaatgctacatctagaaataataaaaatagaaacgatcagaatcgaagcttgatgaaaaagaaaagaaatggttacagctatcaagaataaaaaatatcgcctctttataaacaaacagaacgataataacagtactgctattgagaatccctgcctcagagcattagttaacaactcaatgcctataaatgaagaaaacaaagcaatgatataaattttatcaactctaaatattgttattgctgaaaagatgcaaccaataacaaatattggccatatccaaattaaccaactaatatggcaactatccaacattagaaaattaattaaatcaaatatatatttatatgtgtaatccactcctatatatccactaggattagaacaatattcatcaaattcatttaaatagttctgagtatctgcaccaaaatcttcattcctaaagaaaaacaatacaattaaaaatagaaaaattataaatgacaaaatgtcatttatactttttgtattgaaattacgtttatacgatattaaatagagtaattgtataaacagaaataaagccaggattgtaactagcatttttcacctacacaattatataatagtaattcatatgtactccctaggaaacgcttcaagtaactcttcagaacttctaataaatttattacatctagaaattctaaccaaatcatcaatagaatatttatgatcattatctagtcgtatcattttaggatttatattattagtagtactataatagtccaaaaacttaaaatcaccacctaatacttggtcaccaaatgaaacccataaattaggtataccataagtatctgcagcaattaatccatgaagtgacgatgaaattacaacctcacattcgttaattttatcaataaaaacttcaatgtcatcttgaatatcaacaagaacacatcctttatgtaaaaaatcctgtacaacagctcgttgcttatctttatagtgtggaataataccgactttgtattttttacttctatgttttgctttataaaataaaggcaaaagaacggccgggtctcccaacacatcagggcagtcaattgaaaaatctttctgaagtttatttctagtcaaaacacctcgaacagccctaatatcaggggctgtttctcgtaatggcgcatctttagatataaaaccactcccccatacgatacttttatttgatgcacttgaaagaacgcttcctatagctaatatatgaggtagctttttgaagttgttctttactacctttttattggtaattttttcaattaaatatttatttaattgatcaccccagttattatgtcttgtatagtaattcaccggaacagttttctctcccatattcaagattcgctctttcagttccgttgatatcccatacagagcttcaataattcttcccataaatcctctctttgtaaaacactattaataatgaaaatagaaaaataaagaagttagataatgttatagattgcactatatattgaaaatcataatcattatgtttcaagaataagtaacacgaggacaaaaaaagcgaacacacgtataaccacagaataatacttaaactatagcgcaatttcaaaataagtacaggcatccttgcggaaagataaaaaaattgggccagtgcaagacatatcgaatatttaaaaacatccaaatgtttatatattgttattgataatatatataataaaataaaattaaatgtaatcaaaacaattgaaattacaaggaatttaaaataagatcgccaatcaaatattttatttttattctctatgtttttctttaaaaacatagagtcgtacaatgcaattagcattgtaactacaccaaacacattctgcgtaactctaatttctaccaactctgctgcaggcattctgtcatgaaagaatataaagaaaccttgatttgtaatccaataaataatggtaataacagaaaacacgcctccaaatcttaatgaatcagtaattgcataccataaagatggcatttcatattcaccatcactattgaactttgttttaataaaaagaaaacaacatattatcgttagcggaattaactttgcaccgctatatatatatatatatatagtcgaattaatgcgcatgaaattcagccaacacatcaatataaaaacaaaaaaataaatgccgttattatcgttgaaaagaaagagagacaagaattattaatataaaagcagtatcgttttatgtattctgaagatattccaacaaaaaacaagaataatatttctgccgattgaaaccataatgatacaatcaacatagtaataatacaaaaaaataaaaataactttagccaaaaaagtgaagattgttttttatagcgcaacagtaaatattgcgttgtaaaacaggaacaaaacaatacagatactaatgcaacagattggaataacacaacattagccatatctgatttgtcaagtaaattaccgccaatagcaataaaaataaaaacaagtccagaatctattatttgatcaagcgaaaagaataaagtttgtctcttattactgttcattttgtttcgttagccatgaataacacttatctttttctgataacaggggagacgatactagaggccacttaatatcaatacagggatcatcccatttaacccctctttcacttatcggatgataataattagtcgtcttatacaaaaactccgccgtttcactcagcaccaaaaaaccatgtgcaaatccttcagggatccacaactggcgcttattctcagcagataaattcaccccaacccatttgccaaaagttggtgacgatttacgaatatcaaccgctacgtcaaaaacttcaccaacaacgcagcgtaccagttttccttgcgcataaggttctaactgatagtgcagcccacgtaaaacgcctttactagacttcgaatgattatcctgaacaaattcaaccttacgccctacagcctcttcgaaaactttctgattaaagctttccataaagaaaccacgctcatcaccaaaaactttcggctcgaaaattaacacatcaggaatttcagttttaattacgttcattttattaataacctttaatcattttcagcagatactgaccataagcatttttcttcaacggttcagctaatactttcacctgctcagcatcgataaaccctttacggtaagcaatttcttccgggcaggaaactttcagcccctgacgttcttctattgttgcgataaaattgcttgcctcaataagactttgatgtgtccccgtgtccaaccatgcatatccacgtcccatcatggcaacagataaacgtccctgctccatataaatacggttaatatcggtaatttccagttcgccacgggcagaaggcttaaggtttttcgccatttctacaacatcattgtcatagaaataaagtccggttacagcataattgctttttggctctaacggtttttcttcaaggctaatggctgttccgttattatcaaactccacgacaccatagcgttcaggatcatttacgtgatatgcaaataccgttgcaccactttctttgttaacagcggcatccattaacttcggcagatcgtgaccgtaaaagatattatcaccaagaatcaaagcacaatcatcaccaccaataaactcttcaccgataataaacgcctgcgcaagaccatccggactcgcttgcactttgtactgaagattcagcccccactggctaccgtcacccagcagttgttgaaaacgaggagtatcctgtggcgtactgataatcaaaatatcgcgaatacccgccaacatcagtgtagagagcggataatagatcatcggtttatcataaatcggtagcagctgtttactgactgccatagtcacaggataaagacgagtaccagaaccacccgctaaaataatacctttacgcgttttcatttcatcattccttttaattcatcttgctccaccatcacaaacaagatgcaaaaactattaaatagctgtagtcgtaaataattcgttgagcatgcgtttcacgccaatctgccagtcaggcaagacaagcgcaaagttctgctgaaatttttctgtatcaaggcgagagttatgcggacgacgagctagtgtaggataggctgttgttggtactgcgttgagcttgttgagtgcaaggggaatgcctgcttcgcgcgcctcttcaaaaaccagcgcagcataatcgtaccaggttgtggtaccactggctaccagatggtataagcctgcgacttctggtttattcagtgcaacacgaatggcatgtgccgtacaatcagccagcaactcagcacctgttggtgcaccaaactgatcgttaatgacagctaattcttcgcgctcttttgccagacgtaacattgtcttggcaaaattgtttcctttacctgcatatacccagctggtacggaaaataaggtgcttcgcacaatgctcttgtaatgctttttctccagctaacttggtttcaccgtacacatttagcggtgcggttgcatccgtctcctgccatggtatttcaccggtccccggaaatacgtagtcagtagagtagtgaataacccaggcgccgacttcattggctgctttcgcaatcgcttcgacacttgtcgcgttaagtaattgtgcaaactccggttctgattctgctttgtctactgcggtgtgagcggctgcgttgacaataatatcaggccgaatgcttcttacggtttcagctacaccttcaggattactaaaatcaccacaataatcagtggagtgaacatcaagagcaatcaaattacccagaggtgccagagcacgctgtagttcccaacctacctgccctgttttgccgaaaaggagaatattcattactggcggccctcatagttctgttcaatccacgattgataggcaccacttttcatattttcgacccattttgcattagcaaggtaccattccactgttttacgaatcccgctctcaaacgtttcctgtggtttccagcccaattcgcgaccaatcttctcagcattaatcgcataacggcgatcgtgtcccggacgatcggcaacataagtaatttgctcgcggtaagatttctctttcgggacaatctcatccaacaaatcacaaatagtgagcactacatcgatgtttttcttttcgttgtgtccaccaatattataggtttcacctgctttaccttcagtaacaactgtatataacgctcgagcatgatcctctacatacagccaatcacgaatttgatcccctttgccataaataggcaacatcttaccttccagagcattcagaataaccaatggaatcaatttttccgggaaatgataagggccataattgttagagcaattagtcacaatggtcggtaaaccataggtacgtttccacgcgcggactaaatgatcgctggatgctttggatgcggaataagggctgcttggtgcgtaagctgttgtctcaataaataagggtaatttttctttattatttacttcgtcaggatgaggcaaatcaccatagacttcgtcagtagaaatatgatgaaaacggaagctatttttcttgtcgctatcaagagcagaccagtaattgcgagcagcttccaaaaggacataagtaccaacaatattggtttcaataaatgccgcagggcctgtaattgaacggtcaacatggctttcagcagccaggtgcatcactgcatccggctgatgctgagaaaaaattcgcgccattgcagcagcatcgcaaatatccgcatgttcaaaaacatagcgttcagaatcagaaacatcagcaagtgattccaggtttccggcgtacgttaatttatcgacattaacaacactatcctgcgtattatttataatgtgacgaactacagcagaaccaataaatcctgcgccaccagtaacaagtatcttcacttatttattccatataacttcagagcatgctgtgaaataagcggctcttaggttgattaatagaggtgttaatgcacgctaccgcccctggctttacagctaccagagcactacatgcatgtctacgatgtgacgagcgttacccactcgcgctaaacccgaaaaattcaaacgctaattgtcttaccaatccgctctggaaacaaggaaaatcctggaaaactttgactaaaatcctattgctaactcgttgttattctgattgtttatataaaacaacggcaggaatattcgcaacaaattactttcgccacgaatcttcactgccgttataattttcttatcaaccgttacatccggtcagattttcattattcgcttaacagcttctcaatccctttacggaacttcgccccttctttgaggttgcgtagtccatacttcacaaatgcctgcatataacccatttttttaccgcagtcgtaactgtccccagtcatcagcatggcatcaacggactgttttttcgccagctcggcaatagcatcagtcagctgaatacgtccccatgcaccaggctgagtacgttccagttccggccaaatatcggcagaaagcacatagcgaccaacggccatgatgtctgagtccagcgtctgcggctgatccggtttttcgataaattcgacgatgcggctgactttaccttcacgatccagtggttctttggtctgaatgacggagtattcagagaggtcacccggcatacgttttgccagcacctggctgcggcccgtttcattgaagcgcgcaatcatggcagcaaggttgtagcgcagcgggtcggcactggcgtcgtcgatcacaacgtccggcaataccacaacaaatgggttgtcaccaatggcgggtcgtgcacacaaaatggagtggcctaaacctaaaggttcgccctgacgcacgttcataatggtcacgcccggcggacagatggactgtacttccgccagcagctgacgcttcacgcgcagttcaaggagagattctaattcataagaggtgtcgaagtggttttcgaccgcgtttttggacgcgtgagttaccaggaggatttctttgatccctgcagccacaatctcgtcaacaatgtactgaatcattggcttgtcgacgatcggtagcatctctttgggaatcgccttagtagcaggcaacatatgcatccctagacccgctacaggaataactgcttttaaattcgtcattatttcatccacctgtaaaatggttgctgaattatagcttgttcgatttttttcgccagcatcaattaccctgaattgattactgaattacttgtgatgttacgccgcttcgttgtggattgcagtagcattgttcctaagtatggctccatttttccaggaatggtcgcaaatctactccctccgttccggcaatctaaagttaatcttttccacattaacaatatggtgatttatcctgtcgatatcgacggagctttgccctctttcattcaccgcatgaacatttgcaagagatagcagtgtttcttttttcgccataaagacgccgcgaacgtctttgcgcatgtcaaagttcatgctcaatgctggtccaacagaggatttctgcatcaccttgatattacgcataaaaaggtgttgcggtttattgtgtagctcaagcgaggcacgcttcatctcaatgttagtcagtgccacaaaggagacagcattcccggcggagatttggatgccgcgcaatttataagcaaggtgagtgttatccagttgaatattattcactcggaaattttgcggtatcgagagatatttgcctttaattaccccatagccaattaacatcccggcgctattaatcatttcaatattatcaatcacgaaattgtcacaaccgtaaatagcgactgtggcgttatcaatgcctgctttcttactgaaatccggcgtgatattgcgggctttgatattacgaataacaaaatgtttaccattttcaacatgtatcaactgccgacaatccgatcccgtgatattcgccacgacaaagtttttcactgcctgatcttccgggtaattattatcgtaagtgcttcccgcaaggcctatgccaatgccccagttgattttgccgttagtacagttgatgcgctcgatgacatggtcggagatcaaaatatcactgtcgttaattgccacgttccattcaatggcgtcgccctgtaagtcgctgaacttacagttggtgatgttggcaccgattatctggttatgaaatccctggcgtaagatggcgtaattagcgtggctaacggtcaggttatcgatggtcaggttgcgcatgacccgtttgtttttgccgccgatataaatctgcgttaccggaccaaagccgctcatcgccagccctttgatggtgcagtcagaaccacgcacatccagggtgatgttattcatactgccgccctcctcccctgtcacctggctgccgtcctgtaagacaaatcgccctctgccgttgccgcgcaggcttcccaggatgtgtaacgttttgccaggggggatgaagatgccagtgttgatattgtcgcaaaccaatccgccaggcacgacgaccgtttgcccttcgctgaaggcttgtttaaatgaggcgatccagtcgtgtggattgtagtcgttgatattgacgctttgtcgggcaggaagtgcgcgagcgaaaggggtatggaggaaggcaagcgccgagcttgccgtcaggaaggtgcgtcgggagagttttttaaatggcatgcgttctcctctataaagcctgcagcaagctggcgagttctcgattgatcacctgctggttaaaatcgtgttcgactttttcgcgcgcacgtttgacgaccggagccagttcgtcggtgtccagttggctaaacgccaccagtcgttgcgccagtgcacgagcatcgttctcaggcaccagccagccggatttgtcggcctccaccagttccggaattccgctatgcagagtagaaaccaccggaataccgaccgccatcgcttccattagcgccaccggaataccttccatatcgccatccgcacctgtaaccgatggcaacaggaagacatccgcgtcgtcgagcatcgccttcacttcgtggcttggtttaaagcccggcatctctacaacatcttccagttgatattgttcgatgagggtgcgcaggcgtcgttcccacgggccaatgccgaggatgcgatagcgaaatgccacgccctgctctttcaactgacggcaggcttcaatcgccacatgcaggccttttttctcggttaagcgtgcgacggaaatgatttccagcggcgttgcgggcggttttaccggacgcgggctaaagcgcgtcatgtccacgcccatacgcgatacggcgattttttctctggggcagcccattttttgcagccttccggcccacagatcgcttatcggtagcatcaaatcgccacggcgaaaaagttgttgatattcgggagtgtaatggttgagcacttcccgactggagatatcaatgccgtggaagatagtagcaattttgccgcgaatgacacccagttcgcgtagttttgctgcggttacccccgccgggccaaaatgagcgataaagacatcggcatgaaatggtgttgcgacctggccgcaaatggcagacaaaatcagtttccgcgactcggcaccatagcgtttgaggttgagcgcctgccaggtatttttacgatgaatgccgcgtaaggtctggctggcgcggtggcgcagtttcgccactttgcccgtaggttcgtcctgtaaccagcgggttctggcggcaaggttatatttcgtccatgccgcgtgggtgttttgcgtatcgcctttttgcagcgcgacaatctccacctcaaagcccatatcaataaacgcagtgatttggttgagaacgaaggtttccgacgacagcggaaatttaagtaaaaagaagccgaccttcatttcgcctccccgatgcgctcaagcacagattgcaccatctgcattcctgcctggcgttcgcgactgacggcttcgttaagtcgtgtattcagctccggaagctggcctaaggtatccgcaaccatcgcttgcaggctgccgtctaataaatgacggatatcaatcgccatctcaggtagcccaagctgctgcataatcccggcggatttgtgttcgtagttgatggcaattgccggagtggagaaattcatcgagataatggcagagtgcaggcgcgtaccgacggtgagttcacaggcaccgaggattttgcccatttccagatcgttgagttcatccatcaccacgtgataacgggcaggatcgctgatgtgctgacgcaggttgagcgccaccatgcggtcgtctttgttatagctgtcgatgcccgtacaggtggagagcgcaatcacctgatacccttcatcgagaatgcgattgaccaccccggcaaaggctttttcatacgcttgttgagtggtgccgagacgtttgtcgaacggtgccagttcgcgcagggtaatggccaccgttttctgttgtgcggcaaagtccagccagtgttggacggcatagctggcggtgaaatcttcggtgtggtgatcgaccagccacgcggtatcgacgccatgttcaacttttgcggtagtgatattgctgcgtttcattagatccaggctgaccgattcgcgcaggatcagcgcgtcgcagtgcccgaatacgtagtttgccagttggttaaattgctcatcctggaacgggccgacgctgtgaccaatcataaacagcggctttttcgccataaacgtgcaaagcgcgtgttcaaactgcggcacgccgtagagatcaacaaaaaacgaaccgccgacctggataatggcatcgtaacctgaaagcaggcgaacaaagtcagtaaatccctgggcaatggcgatattacgcagcttgccagtatcggtgacgcgtgagagcaatacctggtgctggtagcggcgacggaggactttttttacgcgcccgacaacacccgccgcgctgttgtgttgtttcatttgcaggaacagcggatcgcccattaccggacggttgagcagccaggaagaactgaccggatagcggctcattacgtccacttcggcgtgtggattgaggatgttgatggcatcaagtaagccgcgcaagatggcgctgtcgccgcgattgccgcaagtgtggttgcccagaatcagtaatttcattttttcctcataaatttgatgccaggtgaggctgtgtttgttgtgttcgttgccgctttttgcctggcgcgtcttatcaggcctacaagccccgagcacagagccgtaggccggataaggcgttcacgccgcatccggcaactattgtcggaaccgaaaacaaccattcacccggcccgcaaaagcattttcattttttcgctgcgacaaaactgacgcttcacttccaccaccagcggatggcgcgacaacacaatcatcaccacaaacgccagcacgcctgtggctatttgcaccgccagcagcatccccagcgccagttggcctttcagcacaatgcccagcgcataactaaccaccagcgtcggcagcgagagataaaacggcagccacaaactcaggatgtactggcgataactggaaccgagcaccggtttaatcatcacgaagtaactcagaatggtgttgataatctgcaccagcaggaaaccaagcgtgacgccgattgcacccgccatctgtccgccaataacaatcgccggaataaacagaaaggttttgaatacgttgaatttaaagctgatatccacccgcgctttcgccatcagcagcgagccaatcgggttacccactgagcgcagtagccccacaatacacagcaattgcagcaccggaataatgctgttccacttttcgccaaagaccagcggtacaaagttattcgacaccaccatcagccccagcagcgccggaaaattgataatccccaccaccgacagcagcttgtagaagttaacgcgcagcttttcggtgtcgtcctgaattttggcaaacgccggaaacaacacgcgggtgatgatcgggttcaatttcatcggcggcacaacggccacgttgtacgccaggttgtatccccctgccacgcccgcgccgagaatacgcgccagcaccagcgtcgaaaggttggtgttgagatagttgatgatgctgtccgccgtcagccatgcaccaaagcgtaagttcggtgccaccgaagccagcgagaaatgcagaccagggcgataaattttgcggccaaagtagccaaacagcagcgttctcaccgcactattgaccagataaccgaggatcgcggtcatcgccaacggccagaaatgggcgctaaccactgtaaaagtaaagcccgccagcaccgcgctggtttcgatcatgccgattttgttgaactccagctccttttgcatcaacgcgcggaactgttgcccgtgggggatcaccacaaacgccagcgacaatgttttaatcaacggcgccagatccgggttattcagcacgtcaccaatggcatcactcaacaaaaacaccgccacgcacaccacaagccccaacccgacgttcagccagtacagcgtggtgagttcaagatggctgatttcttttcgctgaataatcgagttagcgatgccgaagtcagagagtgtatctgccagcgcgataatcaccagcgacacggtaagcaaaccgaactggtggttgtcgataatccgcgccagcacggtcatctgcactagcccgaggccgatgatgatcaccgtagcaatcgccgaccacttcgcgccgctaatggttttttcacgtaagctcatatcaatatgccgctttgttaacgaagcctttgaataccgtcaggaaaacgattttgatatcgaaccagacgctccattcacggatgtactcaaggtcgaactcgacgcgtttttccattttctccagcgtgtcggtttcgccgcgccagccgttaatctgcgcccaaccggtaatgcccggtttcactttgtggcgcagcatgtagccttcaatgagctggcgatattgttcgttatgcgccaccgcgtgcggacgtgggcccacaatcgacatccccccggtcagcacattgataaactgcggcaattcatccagcgaggtgcggcgcagaaagttccccactttggtgacgcgcggatcgttctgcgtcgcctgagtcaccactttgtcgttctccatcactttcatggaacggaacttccacactttgatcggcttgccatccatgccgtagcgagtctggcggaaaataaccggccctggtgaactgagtttcaccgccagcgcaatacagcacagcaccggggagatcagcagcaagatcagcgttgccagcacaatgtcttccgcacgttttatcaggcggttaaccccggaaagtggcgtgtcgtacagcggcaccaccggaacgccgttcatctcttcgaggcgtgaatggagaatgttgaaggtaaagacgtcggggatcagcagcaccgaacaggtggtgtccgccagttgatggaccagttttttcactcgtgcgccgtcgcacatttgcatcgcgatatagacgttgtgaatcttgcccgcttttgcatcctcgaccagctgttgcagattgcccgcccagtcgttagaaacgccgcccggttttgggtcgtggtaaacgcccaccacttcaaaccctaaccacggctgattacggaagctctccatcagcatttgcccggcagctaaatcccccgccacggcaaccatacgcttgttatagccatgattacgcaaccagcccgcaccaatgcgaatacacgaacgacacgccaccaacccgatgctggtcagcccataccacgccagccagattttcagttgcgtgtcgaaatcattgttgaacgccaccagtccggcgctaaaaatcacgcttaaggtccagttttgcagcagcagggcaaattctgtcgttgcccgaacacctcgccatgagcgataaaaatcggtgatgccgcccaacatctggaacaccaccagcgtaatcagcgccaccaacaggtgcatgtagaggaatgacagtccgctgacttcgcaaaccagccatagcccggcaaacatgatggtgatatctgaaaagcgttgcaccatagagattaacgatgcattggttttcgctcgctcgcgcttttttagatttgtcatcgttgttcctgttattagccccttacccgcaatggggtaagggaagatccgacattactcgttcagcaacgtcagcagagttcgcgttcgcgcttccatcagcggcacatcaccgcgcgattccacattcaggcgtaccaccggttcggtgttggaggagcgcaggttaaagcgccagtcggcaaaggtcatgctgataccatcggtgcgatccaccgccagcgcctcgcggctaaaatgctgttcgacgcgattaatcgcctcaacgggttgcgccagtttgctgttgatctcaccgcttgccgggaatgccgccatgcggtcgcgcaccagttcgcccagcgttttccctttaatgcacaccagttcggcgaccagcagccacgggatcatgccgctgtcgcagtaagcgaaatcacggaagtaatggtgggcgctcatttcgccaccgtagatggcgtcttccttgcgcatacgttctttaataaaggcgtgtccggttttcgacattaccggcgtgccacctgcggcagtcaccacatcaacggtgttccaggagagacgtggatcgtggatgatcttcgcgccgggatttttttcgaggaacgcttctgccagtaaaccgacaatgtagtagccctcgataaactgccctttttcgtcaaacaggaaacagcggtcaaaatcgccatcaaaggcaatgcccatatccgcgccgtgtttgatgaccgcattacgggtgtcatcgcgacattccggtagcagcgggttaggaataccgttggggaaattgccgtccggcgtgttgtgcactttgatcaattccacgggtgcgccgagggctttaaagcgggcttcgatggcatccaccaccggacccgccgcgccgttcccggagttgatcaccagcttgagcggcgtaaggtttttgacgttgatataaccgaacagatgatcaacgtaagcgtcgcgcaggttgatttgccgatagcgaccgcgtttggtttcatcgacgggaggaaaatcgttggcttctgccagacgctggacgtcgcgcagtccggtatcaccgctgatcgggcgagccccttcgcgcaccagtttcatgccgttgtaatccatcggattatggctggcggtaacttcgatgccgccatccacaccgagatggaacgtggcgaaatagatctcttcggtgccggacatgccaatatccagcacatcgacgcccgcatcctgtaaacctttcgccagcgccagttttaaggtttcgctggtgagacggacatcaccgcctaaaacaatggttttcggtttgagaaattcgccataggcacgcccaatacgccaggtgatatcttcattcagttcttcgcctaattttccgcgaatatcataggctttaaagcaggttaattttttcatatcgttaccctttttcaggcaatagttggccctgaccgaaacggccaattttgtttttgtcgttatttaccggagatttattccggttgattattcaactactacacccgtccgtagcgatccgcgaagcgcaccacatcatcctcttcgagataagagccggagcgcacttcaattaaatcgagcggaattttccccgggttttccaggcagtgcttcgcccccagcggaatataaatggactcgttttcaccaagcagtttgatatcaccgtcaatggtgacttttgccgttcccgcgaccactacccagtgttccgcgcggtgatggtgcatctgtaccgacaagccctcgcccggtttcacggtgatgcgtttcacctggtagcggtcgcccgcgtcgatagagtcatatttgccccacgggcgatacacttcgcgatgcacccgatgctcatggcgaccatcggctttgatctgctcgaccacttttttcacatcctgcaccgcgttacggtctgcaatcagcaccgcgtctttggtctgcaccactaccagatctttcaccccgacggtggtgaccaggccagattcggcatacacgtagctgttttcggttttgtgattaatcacatcgccgtggcaaacgttgccttccgcggtgtgggcgctgatctcccataaagaggaccaggaaccgacatcgctccagcccgcatccatcggcaccacaacggcatctgccgtacgttccatgaccgcgtaatccaccgactcttccgggcaggcaagaaacgcctcttcatccacacgaataaaatcgagatccggatcgacggcgctcatcgctttttcgcaggcgtcgagaatatccgggcgatattttttcagttcttcgagatagcgtccggcgcggaacaggaacatgccgctgttccagtaatattcaccgcttgccacataggcctgggcggtttccagattcggtttttcgacaaactgcgccacttcaaaggccaccgtatcctgctcgcccgcagacacttcaccgcgacgaatatagccataaccggtttctggtagatccggcacaatgccgaaggtgaccagcttgcccgcttcggcatacggcatggcattacgcacggcggcgcggaacgcgtcttcgtcggcaatcacatgatctgccgccaggaccaacattaacggatcgctgtccggactatgacgttttgccgccagcgccgccaacgcaatggcaggtgcagtgttacgccctgccggttcgagaataatgttctcggtgagtttgttcagttgacgcagctgttccgcgacaataaagcggtgctgctcattgcaaatcaccaccgggctttcgcactccacgccgttcaggcggcagatggtggtttgcagcatggtaagatcgcctttcaggcataaaaactgcttgggataaagtacgcgggaaagcggccataagcggctaccggagccacctgccatcacaactggatagagtttcgactgcgacataattatccccgaatatcatgtataaattgacgtaacacgttctctttatcgagcgtgcgttcagcatattcacgtgccaccgtgttgtgtttgggcagcaggagcgcctgacggatccccgccaccagcgcctcgaccgattctggttctacgcaaaccgcaattcctgagaaggtttcgcaaagctgccccagttctgtgtgggcttctgcggtaatcaccgcgttaccgcctaccgccagaatattggtcagtttcgacggcaatacggcatctgccgcaccgcgtttttgcaccaccagatggcaatcgcccatcttcagcagtgcgggtaaagcgtcatacgattgcagcgggaaaaattgcatattgcgcagtccgcgctgctgcgccattttttccagccgcgctttgccgccgccctgcccgacaatggcaaaaatcagcggttcatcgcgcaggcgatcggcagcttcaataacgttttccagcccctgcttttcaccaatattgccggagtaaagaatgatttttttgttatccggcaggccaagttggttacgaagtgcagcaacatcggcgtctgcgacatgctgaaaacgggcgatttccgaccagttggggaagaaaatgacgttttccgccgccacgcctttttcaacggctttattcatcatcgaacgcgaaatcgtggagacgttatcgacgttatgcagtccgctacgttcgaaggctgtcgccagctgtgccactttgccgcctttaccttttccggcaaggcccagccccagcatggcatctacttcgtaatcctgaatatgcagcacggtacgcgcaccagagagtttcgccagcaggcgcattcccggcgtgcaaaacagcgttggtactacgccgataatgcgatccggcttccagcgacgttgcgccatcaggggaaaaaaactgctggcggcaaagctgccgagatgtaacaggcgtttcagggtgctcggctgttttggcacatacagcgggcagcgccacaccgtggcggccccctcttctcgtttgtaccgccaggcggaatagttctcgcccacctgccactgcgggtagtacggcggtgcggtaatgacccgcacctcatgaccttgtgctgccagccattccaccatctcgccggtgtatttgccgatgccggttaactccggcgagtagttaatgccgtagaccagtattttcataatccgggtactccggcacgcttctcagcgagaaaataggcgcggctgttagcgtgaacatcatcactggcgagcagcgcgtccggcgtcagccagcggtaatcgtcatgctgctcatccggcagtaatagttcctcttccgcgactctgaagcgaaaaccgagcactacatagtgcgtggtgaaatccgtgccggagaagttatcgtcataaaagtgctgccagacaccgtaaaactggcccgctgtcatcggcagacgcagccccagttccgccatcgtcagccgctcaaatgcggcttccagcgtttcgtccttctgcacgcgccctcccggcacaaaccagtaaccctgtgccgggcggttggttcttttgccaagcagaaactcgccgcggctgttctcgacaataaagtcgagagagacaagcggagtggagcgcactaccgtggcaaagtcttcctgacgtaaaaacatcattacccccgaaagcggtcttgattctcaaggaaccactggtaagtgctggcaagccccgcttccagtgagatttcgtgataccagccaagctgatgcaggcgcgtcacatccagcagtttgcgcggtgtgccatccggtttactggcatcgaaaaccacccggcctttgtaacccaccactttggcgatggtttgcgccagctcgcggatagtgcagtcaacacccgtgccgacgttaatgtgcgacagcatcggctgggtgttctccagccagacttcgtgcgccagctccatgacatgaatgcttgccgccgccatatcatcgacatgcagaaattcgcgcatcggcgtaccgctgccccacaccaccacgtccggtgcattctgtgctgtcgcctcgtggaagcggcgcagcaatgcggggatcacatgcgaattattcggatggaagttgtcgtgcggcccgtacaggttggtcggcatgacagagcgataatcgcatccatactggcggttgtaagattcgcacagtttgatcccggcgattttggcaatggcgtatggctcgttggtcggctccagcgtgccctgtaacagctcgccttctgccatcggctgttttgccagttttgggtagatgcaggacgatccgagaaacagcagtttgttcacgtcgttctgatgcgcagcgtgaatgatgttgctctcaatcatcatgttctggtagatgaaatccgccggataggtgttgttggcaacaatgccgcccactttcgccgccgccagatagacctggtcaatacgttcgctggcaaagaaatcatgcacggcgcggctgtccagcaggttcagctcgtcgcgggtgcgtaataccagttccacatcaccgcgctgttcgagctgtcgcttgatggcggaaccgaccatcccgcgatggccagcgataaaaattcgttgtttactcatgcttatgactccagcgcgatcgccacgtcgtagccgtgagatttcagcagagagtgttttttcgccgcctcgaggtcattagccaccatttcagacaccatctctctgagggtgatttccggtttccagcccagtttttcgtgcgctttagtcgggtcgccgagcagcgtttcaacttcagccggacggaagtaacgcgggtcaacggcgataatcacatcccccggtttaacgcccggcgcgtcatgcccggtgacggaaaccacaatgcccttctcttcaacgcccgtgccttcaaagcgcagtttgatgcccagctgtgctgccgccatttctacgaactgacgcacggagtactgaacgccggtagcaataacgaaatcttctggctgttcctgttgcagcatcatccactgcatttttacgtagtctttggcgtggccccagtcacgcagggaatccatattgccgaggtacaggcacgactccagcccctgggcgatgttggcgattgcgcgggttattttgcgggtaacgaaggtttcgccacggcgcggggattcatggttgaagagaataccgttgcaggcgtacatgccgtaggattcgcggtagttaacggtgatccagtaggcgtacagtttggcgaccgcatacggagatcgcgggtagaacggcgtggtttctttctgcggaatttcctgcaccagaccatacagttcagaggtggaagcctgatagaaacgggttttcttttccagaccgaggaagcggatcgcctcgagcaggcgcagcgtacccatcgcgtcgacgtcagcggtatattccggtgactcaaaagaaaccgcaacgtggctcattgcgcccaggttgtacacttcatccggctgcacttcacgcaaaatacgcgtcaggttggaggtatcactcaggtcgccataatgcagatggaatttcgggttacaggtatgcggatcctgataaatatgatccacgcgctcggtgttgaatgacgatgcacgacgcttaataccatgcacctcgtaacctttttccagcagaaactctgccaggtaagaaccgtcttgtccggttacaccggtgatgagagcgacttttgacatgtcttattcctctgtattttttgaatttattcagtttcaacgcgttcgcgtatcaccactgcgggattcccccgacaaactctatttgccggaagcgatttaaaaacactgcttcgcgcacccacgacggtgccgtcgccgatcgtgacgccaggagcaacaaaaacatcggttgccagccagcatttctcgccaatcacaatgggcgtggcgtttatggtgaaatgttgacttgcatggtcgtggctcccggtgcataaataacttttttgcgatatcaccgaatgtgcgccaatggttatttcaccgagggtatataaattgacgtcatcgccgacccacgcgtaatcacctaaggttaatttccacggataggtaatttttactgacggacgaataactacgttttttcctatttttgcgccgaataaacgtaataaaaatgcccgccagcgatacaatacttgtggcgaccaggcaaatattgttgcctgtactgcccaccataattgcactttaatagcgttgccgccccggaatcctttcggcaccgagaaaccgcttaaatcttgcattggtattccttatattcagactttgttatataaggctttagtcttacccgtcgtgcgctggcgtaaatgccaggataattcaacccagaagccagacacatgtaatatttgccgttggacttttttggcgtccgcgcacaattccatattattggtggtagataccccacccatggaaaattcagacaccaggccattgagttttttaaatgcataaccggctttatacattttggctgccagcgcgtagtcggaagaaactttatattccaggtcataacgccattttttcaagccggatacagggaaaaatatcgcctgatgactggcgggcaggctgtgataaatataccagcccggtttggcgctacgtttaattttatgcccgtcgccaaaatccagcagcgcatcgccggtgatcatcatgttatctttttgcatttttaacttacggacaaaatttgcggcatcctgatgaaaaatatcgcccgaattgagaaacaacgcgaacttgccttgtgccatcgtaatgcctttgttcatggcgtcgtagataccgttatctggctcgctgacaaagcgtaggttatagataccattgagattttccagatactcacgggtgccgtcattggaaccgccatcgacaacaatccattcgaagctgatatcttccgcctgcgccagatgcgccagcgaggcatgtgttttgactatcccttcgaggttacgaaacgcgacagtgattatgctaagcaacatgttcttattcttacctcgtaatatttaacgcttttcgcaaaataaacggacagacgattaaaaatgcatattccgggctaaatatcgaaccggtaaaaaacagcgacaccggagtaaaaagatataattgcacgcgaaaattgcggttatcaccaaaagcgttgatcatcatttttatcactttccccatgtaccacagcgataaaaacactgcgaaccaggaaaaataaataatcagcagatacaaaccattgtctatggtttttccgacatccgcaccgttaaatattccgaatgatgcgacatattcataaagtgagccaaatctgactacaccgtcaatatgggtcaaagaataaccgaccatcaccagcggaccgacaatacgataatacgatgacgatccttccgtacctaaatcgcccagacgggtggaaatataaggaaacgcgattaccacaccaaccaggaatacagccagagaaatcaatgccaacggtaactttttcttaatcgcctctttattcagatattgaaatgcccactccagcaaataaaacaggataaaggtcataacccctgaaaacgatccggataatattatccctgcgagaatcatagcatcggttttaggcgttttgataccaaactgtttgatgctgagccaaattgagattaatgccagagcgaaaaatgccggttcgaaataaagtgctgtcgtgcgcttgccgccgaatttaatgaaattcagcacatagctgttgctgtaaatcagatatttcgaaatcgactccataatactgctgccaccggtgaggataatttgcgccatctccactgccgccagcgccaccaccagcccgaccaccagataaaagaaacgtaatatcttgcgatggttgtgtggcgaaatcgttttaaagcgaatactccacaccatgccaataatgatcacaatatagacaaacagcatggttgaagtgacgtatttactggcatccaacgactgaccaaacagatagttgaacgccgtgagtcccgcaccaatccctaaggcaatcatcaattttttaacgctgatgcgttctaaaaacagcagtaacaagacaggtaaaaaagtgacgatagtgatggggaaactttcaccaagctgggcgattttgacgttaaccagcaggtagatcagcggcagcagcaggtagctacagattctgatagaagttgacatactcctccagcatctgttgtccactgtaggcggcgcggctgcgttggctgaactcagccagcgtggtaccaaatatcgcctgcgcgatttccggtttgcttaactgcaccagttgcagcacctcttcttcactgacggttttaccaccggatttttgcagcacttcccgcgccgcatcgctatgggtggcgatcaccggcacgccaatcgatagcgcctcacacaaaatcagcgggtagttatcgacgcgagaactgaacaccagcgcatccatttgattgagcgcgctcatcaacttgcgcttgtcagtttcaaagccgtgattaaccacgttgccagcggtgaacggcgagaacttaccaaaggtatgcagttcaattttgtcgcccagcgccatcatctcacgcaccagttgctggttagtcttgccgtcgtaacgcaggtcatgcgccaccaccgcgattttcggcttgccctgggtttcgcgcaccggaggcaagtccgccagaatcgcttcggttgccatatcaataccattattgataatccggcaacgccctggcccgtacagactattgaaagcgtcagccacatgctggctgggggaaataaactgacagcccagcgccagcatctcgcggaataactggcgtttgcccgccaccagctggtgcgcccgatcaatcttcaccggcggatagttatttaaggtcgggcatttctggcagcccgttttccagccttcgcaaccgtcggtaaaggcgcagcgtccggtaacgctccagtgatcgtgcagcgtccagaccagagtggcgtccggtttatggtttttcaccttttcgcaaaagcgcaccacgctgttaagattcaaccagtagctgtgcagcacatgaaaatgcaggaccaccggacccggtgtgcgagtaatggtgcgatataactcattgaaattgccgaacagatcgcgattaaacagacgaaacagggcaatgttcgccatcgcggtcatccgcggcgtatgtttgatgacctgcggatagttttgatggctgacgctctctttgccgcctttgccgtaaccgtagacaaaatgtgacgccagcccctgttgcagcgcacgctggtggagatctaacgccacacctgctgccccgccttccgccagtcgcacattaaattgcaaaatattcatttaattaccttcactcgcgctttttctcccaccaccagcgcgttgtccgggacagagtcgagcaccacgctgcccgcacccacggtgacgttgttaccaagcgtgatatcaccaagaataatgacgttggcaccgagttcgacgccgttgccaatgtgtggacatgccatgttatcggcaccacgattgccgatagtgacgccgtggcgaatggtgaaatcatcccccgccaccacgtttttattgatcactacggcgtaaccgtgatggatagtaaagcggcggccaatggtcgcggcggcctggatttcataaccgaaaaagcattcggtgataatgcgatacagcaccagcagcggggccgcccacagattgttgaggacgttctttttgcgccacaccgaacaaaaatgagcaacgcgataggcaagaaccatgcagcacgggcgtaaactccagctgttggcgcgcagatcttccagcatctttagcgcccccgaataccatcagccagacgtttgccgttacgcaccgacagcagcgtcagcaaagtgcgccaggtcatacgtttattgcggatctggtagagggtaaacagctgatattttttgcttgcacggtcaaatttatctttgtgcttgcggtaaaagtggaagtacccggagaattttttcggtgacgaggtgatctgcatttcaccgtgattgatatgcaggatctgcgtcgcctcttccactttccacggttcgccatactccaccaccatccgcaggaagatgtcgtaatcctgtgctgctttcagttcggtatcgaacaagcactctttgaaacgccacgcccaggtaaaaacctgattgccaatgatattgcgtttatagaacaggcggcgtgagtacggcgatttgggatacagtggtaagcttgctggttgggaataaacttctccctggcatacgtagtcgttagcgtacaaaaaggcgtgagtgaccagttgctgtttatgggcgaggaagacgctcaggcggttgggcgtccattcatcatcgtcatcgatcccggtaatgtattccccttgcgccagcataatcgcctggttacgtaccgcgcacgccccgctgttaatgtcgttgtgaatgtaggtaatacgcggatcgttgagggcagtgacgtactgttgcagttgttcccaggaggtggagcaatcatccacgatgatcatctcccagttgctgtagtcctggcgcaggaccgattttatcgcccgaatcgccagttgttggcggttccaggtcggcatatagattgaaatcagcggattgtctttcataggttgttctcccggagtgtcgagatgttctgccggtttataagcttgtttacgggttctgttgccggatgcggcgtgagcgccttatccggcctacggagctggtttgcttgccggatgcggcgtgaaggtaggtcggataagatgcgtcagcatcgcatccgacagcggatgtcgttatttcgcatccgacttatattcgtattcgtaatagccataatcctgatacgcgctggcgcggcggaagatggagttcagaatcacccctttcaccggaataccgttttgctcaaagcggctcagactggtttccacttctttcaatgtgttgaccgcataacgcgccaccattaacgtggttccgacatgacgaccaacaattgcggcatcggtcactgccagaatcggcggcgtatcaatcaacaccaggtcatagtttttactcgcccagttcaccagttcggcaaagcgttcgctcatcaacagctcagaaggatttggcggcacctgaccgcgcgggatcaggtcaaatttggcaatagaggtcggtttagcagcggtagtaatatcgccctgaccaatcagaatttccgacagaccattgacgttattggtgcccaacagctcgtgggtgtagcctttgcgcatatcacagtcgatcaacaacacccgtttattggtctggctgatcaccgccgccaggttggcgcagacaaaggttttaccaattgacgggctaaccccggtcatcatcaacacattgttctgcgcctgcatcatcgcgaagtgcagactggtacgcagactacggatggcttcaatcgccagatcggttggattccccactgccagtagctggctctgtttatagcgtttaacccctttgatggttttgacgctatcgcgcgctttctgccactccgacagcgggatgctggcatagacgctgattccgtgttcttccagcacttgcgggctttcgatgccgcgattaaacaacgagcgcagcagcacacccacgatagagagcatcaggccaaggataatcgcgccgaggataatcagccctttcttcggttttagcacgccaggctgggtgattgccgggtcaacaatgcgcacatcgccgacggtgctggcttcggtgattttcagctcctgctctttattcagcagttgcatatagacctgctgaccagactcgacatcgcgggtcaggcgcacaatctcctgctgggttttcggcatcgccgttacgcgaccgttaagtttggctttctcttcttccagcgcctgacgtttctccagcagcgtgcggtacgccgggtgaactttggtgtacagcttggagatttccgcctctttaaaggtcagttcgttcaactgcgcgtcaatgttcaccatcgaatcgagcaccgctttcgcttcaagcggcagatcaacagaatctttatcctgacggaaggcattcagtttgttttcggcaacatcgaggcggctacgtacttccggtaactgttgcgcgaggaaagcgaggcttttcgacgcttccgccgatttgcgctcaatattttgttcctgatagttacgggcgatgctgttaagaatgtcgcggatctgttcgcgatcttcaccggtataagtcaggctcagtacgcctgcgtctttgccgttctccgttaccgtcaggctgttttgcagttggttgatcatccccaacgtggagtatttggtgacggtaaactcactgcccgggcgggcgtgaatggcttcaaccatcagcgtgacgccttcttttttcagcatctggcccgcttgcccacgggcgctaaagccgccatcactgctcagggtgtagtttttattgtccagcacattaagcgtaaacacctggtccgccatctctttcgggcggttaaaggtggtcactttcaccgtctcgttctgacgtcccatcaaacgatcccagcccgcaccgaaaatcgggaacgtgtttttgctcaccgcaatatcgaggtcgagatcgtccaccgttttaccaagcaccagacgcgaacgaatcaactggatctcggcgtccgatgcaggcggtttgttggctaatgccgagccgatatcctgcaccagcgaattgccgctgctttgctcgatttgtaccagtgcgtcggcactataaatcggcgtggcgaagaaggtgtaaaccacggcacagagggcaaatacggcggtgatgccaatcacccaccagcgcgcttcaatgacggtgccgatcaggcgaccaatatcgatttcatcactgcccgttaccggagcggcatgttgttttactttttctgtcattcttatacctgctctgcgttcaatgcctgcgcccactggcgggcagaccgttcaagtaatgtgtacaccgctgcaaacgtttcccggcttttgcgatacggatcggggatttcacattcgttatcccagtgaccaaacagcatcactttgccgcgcatctcaggtgccatctcgcataagcgttcgatatggcgcttttccatggtcaaaatcaggtcatagttgcgacacagacggcggctgatttgccgtgcacagtgaccttccagagacagttgatgttctgcggcgacgctgatagcggtaggatcagcgcccttaccgaccagcgcgccgagtccagcggactccactttcagttccgggtgataacgttgcagtaagcgttccgccgtcggggaacggcaaatattgccgacacagacaactaagatgttgttaaacatgacgattaccagttatgaatgtcgctggctgtatccgtcatgtaacggacaccgctaatagttggcagcaactgattgatcagacggttccagcgggaaaccggggcggtggtgacatacaccacgtcataaggttgcaggcggaattctgtcgccatcaccagcgacgtcgcatcggacatatccagctggtagatattggcaatcttgccattacgcccgccctcgcctttcagcggacgaatgacaaagatgccgctggcgttggaggtggtcatgtcgatgccttcagcattacccagggcttcagtcagggtcatgccgctaaagtccattttcagggtgctctgtttcttcacttcacccatcacaaatactttcagatcatcattacgcggcacgtagagaatatcgccgggataaagcagtcggttctgattgaggtcgccgttttgcatcagcgcctgcaaagaaatgcgttcttcacgaccattgtgtgttagcaccacgttgcgccagtcagcggtgtcggtcaggccacctgcggcgttgatggcgtcgagaatagtcagtggtacgttggtgatcgcctgttgaccggatttattcacctgacctgagatataggccttttgtgagcggaaggcggcgatattaacgtccacctgcgggtcagcgatgtacgtcgctaagcgcccggtaatatcactgcggatttcagcgagcgttttcccgactacgtgaaccttgccgatatacgggtagaacatggtgccgtcaggctgtacccagttgccggtgtcactggagctgcggtactgaccggctggcgtggtgagttccgggtgatcccagacggtgacattaagaacgtcccccggcccgacgcgatactggtaattcgcgatctcgctttccagcgtcatattggggcgcgctacgttgggtcgtggacgtaattggtcaatcaggcgcggggtcaacggataaacattcaccattttgtcgagatcgaaatcagcgtcctgctgtttgatgacgtctttgcccatcgtcgacatattgctgcccggaagtactgtgcaaccgcttatcaaggttactgacaccaataatggcatcaatttcattttggatttcatcattgtttatttatcactttggcagagtaattatcctgtgcactattaatagcaatgtcgccatgcacatttaccttgcagttaattgaatacaaatttaactggcatcagtcctaaaaaaattgatttcatccgcaggctattgacagaataattcagactggtctttcaggcatccagacacgctaccgcccctggctttttagctaccaatacactgatttagcttaatttctcaaaccctctctgcatacaatcgttgatgagaaagggttattgcggaaattaacttccgaatataaggtgacattatggtaattgaatattggctctccaataatgcaggaggaagtgttacagctaacggaatagcaggcaaggtaacaattcggcaattggctatttttaagaattatattaagtgtcattcaatatggtttttaggagtttctttaggttgacaatatttaatattgcgcctccacatgcgatatttcttaaataatgttttattattaccacttttaattcagggataatgtgaggttattaccctcaaataatatgagataaatagtgctgcaacattgcatttttgccccgatttatccatgatcgaattgtgacatttgtcatacaacgaataggttttgtacttactatggaatggattgccgatccgtctatctgggccgggttaatcacgctgattgtgatcgaactggtcctcggcattgataacctggtctttattgccatcctcgccgaaaaactaccgccgaagcagcgcgaccgcgcacgggttaccgggctgctgctggcgatgttaatgcgcctgttactgctggcgtcaatctcctggctggtcaccctgactcaaccgctgttcagcttccgctcgtttacctttagcgcccgcgacttaatcatgctgtttggtggtttcttcctgttgttcaaagccacgatggagctgaacgaacggctggaagggaaagacagcaataatcccacacaacgcaaaggtgcgaagttctggggcgtggtgacgcaaattgtggtactggacgccattttctcactcgactcagtgattaccgccgtcgggatggtcgaccatttactggtcatgatggccgccgtggttatcgctatcagcctgatgttgatggccagcaagccgttaacgcaatttgttaacagtcacccgacgatcgttattctctgcttaagcttcctgttgatgattggctttagcctggtggcagaaggtttcggcttcgtcattccgaaaggctacctgtacgctgccattggtttctcggtgatgatcgaggcgctcaatcagttggctatctttaaccggcgacgttttctttccgctaaccagacactgcgccagcggactaccgaagcggtaatgcgcctgcttagcgggcaaaaagaagatgcggaactggacgccgaaaccgcgtccatgctggtggatcatggtaaccagcagatctttaatccgcaggaacggcggatgattgagcgggtacttaatcttaaccagcgtactgtcagcagcattatgacgtcgcgccacgatattgagcatatcgatctcaacgcgccggaagacgagatccgccagttgctggagcgaaatcagcatacgcggctggtggttaccgacggtgatgacgcagaagatttgctcggtgttgttcacgttatcgacctgctacaacagtcactgcgtggcgaaccgctcaacctgcgggtgttgattcgccagccgctggtgttcccggaaaccttgccgttgttacctgccctggagcagttccgtaatgcccgcacgcactttgcttttgtggtggatgagtttggctcggtggaagggattgtgacattaagtgacgtcactgaaaccattgccggtaacttaccgaacgaagtggaagagatcgacgcccgccatgatattcagaagaatgcggacggttcctggacggcgaatggtcatatgccgctggaagatctggtgcaatatgtgccgctgccgctggatgaaaaacgtgaatatcacaccattgccgggctgttgatggaatatttacagcgtattccaaaacctggcgaagaagttcaggtgggggattatttgcttaaaacgttgcaggtggaaagccatcgcgtgcagaaggtgcagattattccgctgcataaggatggcgagttggagtacgaggtgtgatggtatcggtcattttacccgatagccgaaaggaataagatgagggaaccgcgccagcggcgatttaccgccgggagcccgggttgccagggtggtggcgattgagccaccctggcacgttcaccggcttgagcgttccatagtagtgaggaacatcaagtgaacggaacagccttcgatcttacatattcagaatataatggtgccgccgcgaacgcctgatgcgacgctttacgcgtcttatcaggcctacaggacaggtcacctggtaacctacatcttctccagcaacttcttcacatctttgccattgcgggaatctttattccgctcggcccagtcattcaggcgacgtttcgcttcgtcctgtagatgtttgcgcagtaactgatccacttgcagactgtaattgagttgctgccagttgccataaacccgcagcggtactggcgtttctttgaggaaatcaatcagtttgctttccccgttccagccacccacgacccgaatatcaaactgggtgtcgcaggtttgatctgccagattcaacatgccttcccctgtcagcgccagcacaggcgattgaccttgcatgtcgtttaacgtcacgacgccatccttcaacgtcaaatcggtggtaaagcggtcaagacgcgttacgttatcgaagttttcagcggccttcacatcaccaccattacgttctaccgcttgctgaatcatctgctggaagttcatcccttccatgcgcgtgtcggtcatttcgacatgtgcctgtccttgccagttgtggcggaatgcgtcggcatctatgtcagcaccggagaaatcaccagccagtgacatttttccggtcaacgaaatcggatagttaaacgccttcagaatggtaccaatctcaacgttttccagccgtggctggaagtttatccgcggatttactgatgtcgcgtccagcgtgcccggcagtgaaacctgtccaccgttaagtttgccctgcaactggataatctccagcaaacccgacttgttggtcatttgcgtggcaacatctgtaaaattcattccgcgccagcgcacgttactggcctgcaacaaaatatcagccgtaaagccttgcagtccctgatatgccggttcatcaatacgcgaagaaatgaccgggcgcggcaatgttgattggctctgcccctgctgcgcggcaccgttttcaccattcgctgtttcattaagcgggatgaggttgtcaagattcagttgcgggaattgcagtctcagctgccattcaggtttctctgtcagcgtgacctgtgcttgcccgctcagcgtgctgtcattggcggtcaagctgatttggttaaatgaaaggcgtttatgtgactcctgccactgggcctggaaactcccctgcccctgaataccttgttttggtaaatctgcaccctgcaactgccagttaatttgttcaatagccgccgttaaatcatgcggataatcagaagcatctaccgtaccgttaagggatatcgtgagatcgcgctgatcgcgattaacccgcccggagaactcaaatgaaccacgatgttggggatcttgttccatttgcaggcgaatattgcggattgtcacctgctcgtcatcttcatgctggaacaccagcacgctgtccgccaccttaagactggatatatcaaacgaccatccgcgatcgtctgacagatccggcaaggtattgtcgcgcggtgcaaccggagcgtcttcactgcgcaccgcttccgtctgcggcgtcagttgaatcactgccccttttagcatcacctgcttaacgctcagttgatgactcagtagtggtaaaagcgccacgtccagacgcatgttgtcggcgcgaaccagtggctggcttgcgccctgggcggtgagagacattcgcccggagaggatactaagctgcggccagacgtgccaacgcagtggcccgtcgagctgcaattgataaccgctacgtgcagcaacttgcttgaccatatagtcgcggaaatcattcggattcaccagcaacactaacgcagataacccggccaccagcacgaccaggagtatcatcagcgtcgtcagaaatcgtctcatggtatcctcaatgggcctgaattagtctttatcgattcggctggctaccgcgccctgctgattgcgatatttcgcatcttcacggcggttgtaaggtcgcgccgccgggccggaaagcggctcaaagctcagcgcaccaattaacatgcccggacgcagcgccagcggcagcttaccggagttgtagaactccagcacaatgcaaccagaccagcccggatcgatacggtgcgcggtgacgtgcaccatcagccccagacgcgccagtgaggaacgcccgtccagccagcccaccagatcggctggcagcgtcaccgactccagcgtcaccgccagcgccagctctcctgggtgaagatagaacgcctcgccctcgtcgagaacgatctcatcgctcatcacgcggtcaagcgcggcgctcacttcatctttgggaccgctcagatcgataaacgctgccgtgtgaccacggaaggtacgaaatttattgcccaggcgtacatccaccgtcgcgccgttaatacgctccactggcggacgtgggttgatcgacaaacggccttcatcaagccaggcttcaatatctcggtcacacagacgcatggcattttctcctttcgcgcatcactcccttaacgccaattacgtcaagggcataccaggttatcactgaacggtacacaatttatcaagcttattcaaagaactgacttattttcgctttcaatatatcgatcgcgatgcggtttttcccgccgcgcggcacgataatgtccgcatattgtttagaaggctcaatgaattgcaggaacatcgggcgcacggttttttgatattgcgccatcacggaatccattgaacgcccacgctcgttaacgtcacgcttgatgcggcgcatcaggcagatatccagcggggtatcaacgaaaatggagaagttaagttcgtcacgcaaacgcgcatccgtcagcaacaaaatgccttcgagaatgatgaccttcttcggctcaaccgtcaccgtttctttcatacgcgtatgttcaacatagctgtaaaccggcaggtcaattgccgagccgcgtttcaacgcttgtaaatgctcaagcaacaggctgtgatccatcgcgctgggatggtcgtagttggtcttaacgcgttcttccatcgacagatggctttgatctttgtaatagcagtcttcgggaattacgccgatgtgttcatcaccgacttgctcacgtaattcacgataaagggtactggcaataagactcttgccggaagccgatgcgccagcgataccgataatgacgcactgatgagactgatcagtcatatatttagcgacctgattaacctggatgttaggaagggggcgacgaagcgccaaacgcggcaattatagggatttcatccgtctgataccagtcgaatagcgttgccgcgcgctcagagttaattgttgacaaagaattcccggtggcaaattacgttgatcagttttatgtaaggtaaaaaatgttatacgcagttgcgcaaattatccgcctttacgtcactttatgagcaattcgcatataaaatgtaaaacttttgtactagcataaacacagaaacgaatactggcgacctggtcttgcggataaagcggtaatgagcaaacaatcacagcatgtattaattgccctgccccacccgctgcttcacctggtcagtttaggtttagtctcgtttatctttacccttttctcgcttgagctttcgcagtttggcacccaactcgccccactgtggttcccgacgtccatcatgatggtggcgttttatcgccatgccgggcgcatgtggccgggaattgcgctgagctgttcgctgggaaatatcgccgcatccatcctgcttttttccaccagctcgctgaacatgacctggacgaccatcaatattgttgaagccgtggtcggggcagtgctgctacgtaaattgctgccgtggtataaccccttgcaaaatctggctgactggctgcgtctggcactcggcagcgccattgttccgcctctgttggggggtgttctggttgtcctgctgacgcccggagacgatcctctcagggcatttttgatatgggtactgtcagaatccatcggcgctctggcactggtgccgctgggattgttatttaaaccacactatctgctgcgccatcgcaacccacggttgctttttgagtcgctgctcacgttagccatcacactgacgttaagctggctttcgatgctgtatctgccgtggccttttactttcattattgtgctgttgatgtggagcgccgtgcgtctgccacgaatggaagcctttttgatcttccttaccacggtgatgatggtgtcgctgatgatggccgcggatccctccctgcttgctacgccgcgtacgtacctgatgagccatatgccgtggctaccgtttttgctgatcctgctgcccgccaacatcatgaccatggtgatgtatgcctttcgtgcggaacgcaaacacatttccgaaagcgaaacccactttcggaacgcgatggaatattccgctatcggtatggcgttagtgggcaccgagggacaatggctgcaaaccaacaaagcgctctgccagtttctcgggtacagtcaggaagagctgcgcggactcacctttcagcaactgacctggccggaggatctcaataaagatctccaacaggttgaaaagctgataagcggtgaaataaacacctattcaatggaaaaacgctactacaaccgcaatggcgatgttgtctgggcgttgcttgccgtctcactggtgcgccacacggatggcacgccgctctattttatcgctcagattgaagacattaacgagctaaaacgcaccgaacaggtcaatcagcaactgatggagcgcatcactctggctaacgaagcgggcgggattggcatctgggagtgggagttgaagccgaatatttttagctgggataagcggatgttcgagctgtatgaaattcctccacatatcaaaccgaactggcaggtgtggtacgagtgcgtgctgccggaagatcgccagcatgccgaaaaagtgattcgtgattcgttgcaatcacgctcgccctttaaactggaatttcgcattaccgtaaaagacggtattcgccatatccgcgccctcgccaaccgggtactgaataaagaaggcgaagtcgaacgtctcctcggcatcaatatggatatgaccgaagtgaaacagcttaacgaggcattgtttcaggaaaaagagcgcctgcacattacgcttgattccatcggtgaagccgtggtctgtattgatatggcgatgaaaattacctttatgaatccagtggcggagaagatgagcggctggacgcaggaagaagcgttaggtgttccgctcctgacggtgttgcatattacttttggcgacaacggaccattaatggagaacatttacagtgccgacacctcacgttccgcgatcgagcaagatgtggtgttgcactgtcggagcggcggcagttacgacgtgcattacagtattacgccgttaagtactctggacggcagcaatattggttcggttctggtgattcaggacgttaccgaatcacgcaaaatgctgcgccagctgagctacagcgcctcccatgatgcactgacgcatctcgccaaccgcgccagttttgagaaacaactgcgtatcctgctgcaaacggtaaacagtacacatcagcgacatgccctggtgtttatcgatcttgatcgctttaaagcggtgaatgacagcgccgggcatgcggcgggtgacgctttgctgcgcgaactggcgtcgttaatgctgagtatgctgcgttccagcgacgtgctggcgcgactcggtggggatgaatttggtctgctgctaccagactgtaatgttgaaagcgcgcgttttatcgctacacgcattatcagtgccgtgaatgactatcactttatatgggaaggccgtgtgcatcgggtaggtgccagtgccgggattaccttgattgatgacaacaatcatcaggcggcagaagtgatgtcgcaggctgatatcgcctgttatgcctccaaaaatggtggccggggccgggtgacggtttacgaaccgcagcaagctgccgcacatagcgaacgggcggcgatgtcgcttgatgaacagtggcggatgattaaagagaatcagttgatgatgctcgcccacggtgtcgcttcgccacggatcccggaagcgcgtaatttgtggctgatttcacttaagctctggagttgcgaaggcgagattattgatgaacaaacatttcgtcgtagcttcagcgatccggcacttagccatgctcttgaccgacgggtattccacgaatttttccagcaggccgcaaaagcggttgccagtaaaggcataagcatcgccctccccctttccgttgccggtttgagtagcgccacgctggtgaatgatctgcttgagcagctggataatagccctctaccaccacggttattacatctgattattccggcagaagcgattttagatcacgcagaaagcgtgcaaaaactgcggctggcgggatgtcggatagtgctcagccaggtgggccgcgatctgcaaatcttcaactcgctgaaagcgaatatggcagattacctgctacttgatggtgagttatgcgccaacgtgcagggtaatttgatggatgagatgctgattacgattattcaggggcacgctcagcgactcggggtgaagactatagccgggccagtcgttttacccttagtgatggatacgctttcgggcatcggcgtcgatctgatttatggtgatgtgattgccgatgcccaaccgctggatttgctggtgaatagtagttatttcgcgattaactgagggagcgtttgcccattgcctgatgcgacgctaacgcgtcttatcaggcctacaaatctacaaatcgctcattctccaggccggataaggcgctcgcaccgcatccggcgaccaacgtcatgcttcgtctggttgccagccttccgtataccagatatgcaacagcgcataagagcgccagggcttccagcgttcggcataacggcggatttgtgctggtgtcattcccggaaatcgctgtttaatcagataatcatccggcaggaaaacatctttcgcctgccagctacgcaaagcgaaataattcgccgtccagcgcccgatacccggaaaagtttgcagcgttttcatcgcttgttctacgtcgcccggtattgtcattggtaaggtgccctccagcgccgcatttgccagatgaatcagtgcctctgcccgtttcaacggcatgcctaacgcttttaatgcctgcgggtctgctgctgccagccgctgaggcgtggggaagcagatatactccggaaaatcatccagccgttcgccataaagctgtgccactttggcggtcaattttgccgccatcgccacgctcaccagttggcctaaaatggcacgcacgccctgttcaaaagcatcaacacagccgggtaaacgcaatccgggccgcgccgcgcctaacttgcccaacgcaccgttaacaatctgcgggttacattgcagatcaagcaggcggctcattttcgccatacactcagcggcaacgggttctaaacctgcacttaaatttatgtgcagagtatggcgggctatatccggaatagcagtcaccacgccgcgatattcgcccaccgccagactacgggcataataactgtccgcgacagtttccacaccactcaccgcacgggcggcgagaaatcccaacatccacgaccagtcatacggcggctgccagttcagggtatacatcgcatctccttgttaatccgctttcagcataaacgttattcagacgctacgctttgctttcatattccggttgtcgcgacggcaacatttcgctaaagtcacgccccttcttcaccggcatggggattatttcgtgtttattggttttgattacggtacagcaaactgttcagtggcggtcatgcgtgacggtaaaccgcacttgctaaaaatggaaaacgacagcacgctgctgccttcaatgctttgcgcgccaacgcgtgaagcggtaagcgaatggctgtaccgccatcatgatgttccggcagacgacgatgaaacgcaggcgctgttgcgtcgggcgattcgttataaccgcgaagaagatatcgatgttacggcgaaaagcgtgcagttcggtctttcctcactggcacagtacattgatgatccagaagaagtgtggtttgtgaaatcaccaaaatcgttcctcggtgccagcggcttaaaaccgcagcaggtagcgctgtttgaggatctggtctgcgcaatgatgttgcacattcgccaacaggcgcaggctcaactgccggaggcaattactcaggcagtgattggtcgcccgatcaacttccaggggcttggcggcgatgaagcaaacgcccaggcgcaagggattctggaacgcgcggcgaagcgtgccggattcagggacgtggtattccagtacgagccggtcgcggctgggctggattacgaagccaccttgcaggaagaaaaacgggtgctggtggtggatatcggcggtggtacgactgactgttcattgctgctgatggggccgcagtggcgttcgcgtctcgatcgtgaagccagcctgctgggtcacagtggttgccgtattggcggtaacgatctggacatcgcactggcgtttaaaaacctgatgccgttactgggcatgggtggcgaaaccgaaaaaggcatcgccctgccgattctgccgtggtggaatgcggttgccatcaacgacgtacctgcgcagagtgatttctacagtagtgccaacggtcgtctgcttaacgatctggtacgcgatgcccgcgaaccggaaaaagtggccctgctacagaaagtctggcgtcagcgtttaagctatcgcctggtgcgtagcgcagaagagagcaaaattgctctttccagcactgcggaaacccgcgcctcactgccgtttattagcgatgaactggctacgctgattagccagcaagggctggaaagcgccctcagccagccactggcgcggattctggaacaggtgcaactggccctggataacgcccaggaaaaaccggacgttatatacctgaccggcggtagcgcccgttcgccgctgattaaaaaagcgctggcagaacagttgccgggcattccgattgcaggcggcgatgactttggctccgtcaccgccgggctggcacgctgggcggaagtggtgtttcgttaattgaaaaatggctcagcagcggcttaaatctgcctgcgcctgagccagtttttctgccgcctgacgtaacggttccatcaacggcatggtccgtgctggcgcatgaaggcggaatcgctgcaactctgtcgcgccgacagtcaacgtcgattccagccgatgtcgtttggcggccattttagtcattaccgcttgtctgtctgcaggcgttaccgcttcgttcggcctgaacacaaaacggcgttcacagctcgctttccagtcgataaccgcctgggtcagatggtcgccaaaccctttcacttgcttaacgccacgacgggtaacatctgctgctgtttcaataccaaaggaccgtaacgccgctttacgcgcagggccaacaccgggaatagaggcaacatcaataaaaaatctctccagaaacttctgtttctgccgttcccttgcagtgtcatgaagtgctgccagagcgcgtttctcttcttccggtaacccgagaattttgtccttcattttttcgagcatcgcccgtttggcgataaaaccttccagcccgcccaactgttggatctggttgactaaatggtcatagtccattttcgcgcgattaaatacctcacggcgttgctgaacttctgctttgtacgctttgcttgtcagactgccaataatccagatagccgccagcacaggaaccaaaataatataacgcggttctgcctgaaggccgcaaagcaacagcgataacgctgacagtgcgatctcaatcagaatgatgtattcgcgccgtaacaggcctaaaggaagcggcctgccagtcggttggaaatgatcgggtaatggcagttgcaatgctggcggcgctactgacgccatcaccatcgcccagactttcgccagcacaaaatcaccgctggtggtaatgacctcttcgccgagatcaataaaatagataacgccttgattatccagcgcacaccacgggcagtcagtcaaatgagcggggtaaacatgcattgctgaaacggtacatttctttaactgttggcgtagagagtccagtgccgctacccacgctttagccgtcggacgccccgttgccacgccactttccgtgaatgcctgctgaaacatggcttcaacatcgcccggtaacatcgacagcggaatcgatcgtggcggcggttttaaaccacgtcgctgattatctgacgcgtaggcataacggaaatgggcaatatccgtctccagcgcattacccgcatcagagataagcggcacaccagaataaggatgccgcccaccaaacaagacgtgaaaaatcagcaacgcaaggccaaaattatcgtgattcgcggtacgttcaaaaccgacaaatgacgacaaggtttgtagctctggcggcgtaaaatgcgacacgccgacttcgcataaatgcagtgtgccattggcgttaatctgaaaggagtcactatcgatcaacaccactttgctgtcgcgacctaccataaagctgttctggtttacgtcccccacgacgtgcccgtgctcgtgaaccgtagcaaaagatgaagcaatattgcgcgcaacatagagtagaaaatcccacgcacaatgagggtaactctggcgacgatgtgccgggctatagatcatatgaatcggttctttaccagaaacttttggcatcataaaaccgataacttttccgcctcgtccaccgtgaagcgttgcctgcggccaggcgacataattcaacaactgcgcgtcagctgtcgcagccataaaggcaagtttgtcctgttttaaggcgggtggcggcgtgtgataaatcttggcgacgctatcgacaaactcctcgatatcataaaccgcgccttcaccacctttgcccagttcacggccaagagtggtcaattcacctgtcgatgtaaatacttttatatttgttttcataatatttcgcgggtagttatattatatttcaatgaataataacaactaaccattaaaattatttctatatggggaaaacccactcaagaataaaaatgataatgcaattttatcaggatacaattcaatttcggcctgataatgattaacttccacaggtttttgctaactttgactacaaagggattctggagaaaaaatgaaaaagatattacttatgttgagtctgctattttttactaccgcgggctttagtgaagtttcggatacgttagtgacgggaggttatgataaacaagcgatgtctgacgcgattaaacatgcgcggaaagaaaccgataaattcatcgaggttatgaataaaaaagatgccgatactttcgcagtcaaagccccgataaccgatcacggaagaaccgagcatttctggcttacggatgtcacttattctaacggcatgtttattggcgtaatcagcaatgaccctggtattgttacaaacgtagaatatggccaggagtggaaaatcaagaaagaagatatttcagactggatgtatacgcgcggggataaaatttacggcggttataccattgatcctttattggtcacctatccaaaagaagaagccgacgagctaagagcaaaattagttcgctaatcagccgttatatttattgtttaaactggcggttgaattgttgtcttcaaccgccatgagaaactcactctgcccacagcgccagtgccaacgttttatcatcatccgtacgctcgtttaccgccgggctggacaaaaactgctttaacaattcaggtaataaatcgagttgttcctgcgttgctgccgccagtccattgaaaaacggggtaaagaaaggcacatgaggagaattatccagcatatttaacgccagtcgctggataccatccgtaaatgctgcaactttgtgcgcacgcccagtgctggtgaaagtttccagtctggaaacggcatcttcgtcggtaatgaagtgcgtcatgttggcatattcacccgccatcggcgtgagaggcaattgcagaccgtgacccaaatctaccaccacgccgccatcgccaatctgcataatcaaggtgccgtcaggcgatgaaatcagtcccagaaatgtgcaggcaaaatcgcgaaccgctaattctttggcttccgcctcggcaaaaagtcgttgacgaatggtcagtaccatatttgtggcgaggacatcattaagccccaattccccgccctgcactttttgcgacatataagccatcgcttcattgacggcgagcatcgcgccttcgccaccctgcgagacactgcctgcgccatcagcgacaaataccgacaataatggctgctggtcatttaaccaggcaatctgcatctggcaggcatcctgacaaggcaagtccgcgctgatgtgcgacgttccaacggttgatgcatagaccagacgccagctcacactgacgtccagccttttggcgcttccagcacaacttccgttcccggcgtggagcgggaaaccgaacgcagcgaactggataaccagctaaacagttcacggaattgtaatccttgcagaggcaaaggctgacgaacgctaatttgtgccagcgtcttcatatccgccccctgaacaccgatggaaaagaaagcaaaccttttatcttcttccccccgaaacactttgttggctgcagcctgccactcatcggttggtgcaccatcggtaatcaggaaaatccacgggcgataatacgaaataccatttgcacgatactcacgtttccgctcctctaccatatccagggctttggtaatggccgcacccattggtgtatcgccctgggcaaacaggatgggcggaaaaaaattagcggcgctggtaaagggttgttccacatgcaccgggccgaacgtcacaatgccgagttccactctttttaaagccagcggatcagcaagcagttcatcacgaaaggtaaccaatccggcgttaagttcattaataggtctaccgttcatagaaccagaaacatccagcagcaaaatgcaggggcaacgtggttccgggttactggcaaaatcgctggtggcaaacgtgatttgttcgctcataagaaatcctttcttagagaattatcgaggtccggtatcataccgactgcaataatgaaataagagcaaacgaagaaactttcagaattaggcccggcggcgcagaaaattttgctattcgcctcgcaagaacggagagccgtcgattgacactaagggcggagtgacataatttcaggagtgagggttagggagaggtttccccctccccctggtgttcttagtaagcctggaagctaatcactaagagtatcaccagtatgatgacgtgcttcatcataaccctttccttattaaaagccctcttctccgggagaggctttcccgtttcagcgtcccgctgaaatcatcggcttacctcctttcgccctgaatgcagtctatcgctaacgcgtgaataaaatagtttcctctgtgattattgcgtaacgactcgcaaagaatatttgctggcaggatcgcagactacaaagcctgcggattgacaatcttatcgtgaaggcatactttcaggagtgagggtagagcggggtttcccccgccctggtagtcttagtaagcggggaagcttatgactaagagcaccacgatgatgagtagcttcatcatgaccctttccttatttaaggccccttcctcgggaggggctttcccgtttcagcatccggctgaaatctgcggcttacctcctttcgccatgcaagcagtctatcgctaacgcgtagataaaatagtttcctgtgttattactggatgcgtgctcgcaaatgtgcccgtcattcagacgattccagacagtgtttcataattcctccatttttctcccttattggctggctacactagtatcattccgcgaaacgtttcaggaagagaaactcttaacgatgaaaggcagttataaatcccgttgggtaatcgtaatcgtggtggttatcgccgccatcgccgcattctggttctggcaaggccgcaatgactcccggagtgcagccccaggggcgacgaaacaagcgcagcaatcgccagcgagtggtcgccgtggtatgcgttccggcccattagccccggttcaggcggcgaccgccgtagaacaggcagttccgcgttacctcaccgggcttggcaccattaccgccgctaatactgttacggtgcgcagccgcgtggacggtcaactgatggcgttacatttccaggaaggccagcaggtcaaagcaggcgatttactggcagaaattgaccccagccagttcaaagttgcattagcacaagcccagggccaactggcaaaagataaagccacgcttgctaacgcccgccgtgacctggcgcgttatcagcaactggcaaaaaccaatctcgtatcccgtcaggagctggatgcccaacaggcgctggtcagtgaaaccgaaggcaccattaaggctgatgaagcaagcgtcgccagcgcgcagctgcaactcgactggagccgcatcaccgcaccagtcgatggtcgcgttggtctcaagcaggttgatgttggtaaccaaatctccagtggtgataccacccggatcgtggtgatcacccagacgcatcctatcgatttgctctttaccctgccggaaagcgatatcgctaccgtcgtgcaggcgcagaaagccggaaaaccgctggtggtagaagcctgggatcgcaccaactcgaagaaattaagtgaaggcacgctgttaagcctcgataaccaaatcgatgccacaaccggtacgattaaagtgaaagcacgctttaataatcaggatgatgcgctgtttcccaatcagtttgttaacgcgcgcatgttagtcgacaccgaacaaaacgccgtagtgatcccatcagccgccctgcaaatgggcaatgaaggccattttgtctgggtgctgaatagtgaaaacaaggtcagcaaacatctggtgacgccgggcattcaggacagtcagaaagtggtgatccgtgcaggtatttctgcgggcgatcgcgtggtgacagacggcattgatcgcctgaccgaaggggcgaaagtggaagtggtggaagcccagagcgccaccactccagaagagaaagccaccagccgcgaatacgcgaaaaaaggagcacgctcctgatgcaggtgttacccccgagcagcacaggcggcccgtctcgcctgtttattatgcgtcctgtcgccaccacgctgctgatggtggcgatcttactcgccgggattatcggttatcgcgccctgcccgtttcggcgctgccggaagtggactatccgaccattcaggtagtcacgctttacccaggtgcaagcccggatgtcatgacctctgccgttaccgcgccgctcgagcgccagttcgggcagatgtctggcctgaaacagatgtcgtcgcaaagttccggcggtgcgtcagttatcaccttacagttccagctaacattaccgctcgatgtcgccgagcaggaagtgcaggccgcgattaacgccgccactaacctgctaccgagcgatctgcctaacccgccggtttacagcaaagtgaacccggcagatccgccgatcatgacgctcgccgtcacctcaaccgccatgccgatgacgcaagtggaagatatggtggaaacccgcgtcgcgcagaaaatctcgcagatttccggcgtcggcctggtgacgctttccggcggtcagcgtccggctgttcgcgtcaaacttaacgctcaggcgattgccgccctcggcctgaccagcgaaaccgtgcgcaccgccattaccggcgctaacgttaactcggcaaaaggtagcctcgacggcccttcccgtgcggtcacgctttccgcgaacgaccagatgcaatccgccgaagagtatcgccagctaatcatcgcctaccagaacggcgcgccgattcgtcttggcgatgtcgcaaccgtagagcaaggtgcagaaaacagctggcttggcgcatgggcgaacaaagaacaggccattgtgatgaatgttcagcgccagcccggtgctaacattatctccaccgccgacagcatccggcagatgctgccacagctcaccgagagtctgccgaaatcggtgaaggtaacagtgctttccgatcgcaccaccaatatccgcgcatcggtcaacgatacccagtttgaattgatgatggctatcgcgctggtagtcatgattatctacctgtttttgcgcaatattccggcgaccatcattcccggcttcgcagtgccgctgtcgttaatcggcaccttcgcggtcatggtgtttctcgatttttcaatcaataacctgacgctgatggcgttaactatcgccaccgggttcgtggtcgatgacgccatcgtggtgatcgaaaatatttcccgctatatcgaaaaaggcgaaaaaccgttggcggcggcgctcaagggcgcaggtgaaatcggctttaccattatctcgctgaccttctcgctgattgcggtgttgatcccactgctgtttatgggcgatatcgtcgggcgactgttccgcgaatttgctattaccctggcggtagcgattttgatctcagcggtggtgtcgctgaccctgacaccgatgatgtgcgcgcggatgctcagccaggagtcgttgcgtaaacagaaccgcttctcccgtgcctcggaaaaaatgttcgacaggataatcgccgcctatggtcgtggactggcgaaagtgctgaatcatccgtggctgaccttaagcgtggcactcagcacgctgctgcttagcgtgctgctgtgggtgttcattccgaaaggtttcttcccggtacaggacaacggcattattcagggcactttgcaggcaccgcaatccagctcctttgccaatatggcccagcggcaacgccaggtcgcggacgtgattttgcaggatccggcagtgcaaagtctgacctcatttgttggcgttgatggcactaacccgtcgctgaacagtgcgcgtttgcagatcaacctcaaaccgctggatgaacgtgatgatcgggtgcaaaaagtcatcgcccgtctgcaaacggcggtggataaagtgccgggcgtcgatctcttcctgcaaccaacgcaggacctgaccatcgatactcaggtcagccgccccagtaccagtttaccttgcaggccacctcactggatgcgctcagtacctgggtgccagagttgatggaaaaactccagcaactgccacagctttctgatgtctccagcgactggcaggacaaagggctggtggcgtatgtcaatgttgatcgcgacagcgccagccgtctggggatcagcatggcggatgtcgataacgccctgtacaacgcgtttggtcagcggctgatttccactatttatactcaggctaaccagtatcgcgtggtgctggaacacaacaccgaaaataccccaggcctcgcggcgctggataccattcgcctgaccagcagcgacggtggcgtggtgccgctaagctcaattgccaaaattgagcagcgttttgcgccgctctccatcaaccatctggatcagttcccggtaacgaccatctcctttaacgtgccggataactattcgctgggtgatgcggtgcaggcgattatggacaccgagaagacgctgaatctgccggtggatatcaccacgcaattccagggcagcaccctcgccttccagtcggcgctgggcagcactgtctggctgattgtcgcggcggtggtggcgatgtatatcgtgctcggcattctgtacgagagctttattcacccgatcaccattctctcgacgctacccaccgcaggggtcggcgcactgctggcattaatgattgccggaagtgagctggatgtgattgcgattatcggcattattttgctgatcggtatcgtgaagaagaacgccatcatgatgatcgacttcgcgctggctgctgagcgcgagcaaggcatgtcgccgcgcgatgccatctaccaggcttgtctgttgcgttttcgtccgatcctgatgaccaccctggcggctctgcttggcgcgctgccgctgatgttgagtaccggggtcggcgcggaactgcgtcgtccgttaggtatcggcatggtcggcggtctgattgtcagccaggtgctgacgctgttcaccacgccggtgatttatctgctgttcgaccgcctggcattgtggaccaaaagtcgctttgctcgccatgaagaggaggcgtaagtgaagttttttgccctcttcatttaccgcccggtggcgacgattttactgtcggtcgccattaccctctgcggcatactgggcttccgtatgctgccggtcgccccgctgccgcaggtcgattttccggtgattatggtcagcgcctcgctgcccggtgcgtcgccggagacaatggcgtcttccgttgccacgccgctggagcgctcacttgggcgcattgccggggttagtgaaatgacctccagtagttcgctcggcagcacgcggattattttgcagtttgattttgaccgggatatcaacggcgcagcgcgtgatgtgcaggcggcgatcaacgctgcacaaagtttgctgcccagtgggatgcccagccgtccgacctatcgcaaagcgaacccgtcggatgcgccaattatgatcctcacgctgacatccgatacttattctcagggtgaactgtacgatttcgcctcgacgcagctggctccgacgatttcgcaaatcgacggtgttggtgatgtcgatgtcggcggcagctcactgcccgccgtacgcgtcgggctgaatccgcaggcgctgtttaatcagggcgtctcgctggacgacgtacgcaccgccatcagcaatgccaacgtgcgtaaaccacagggggcactggaagatggcactcaccgctggcagatccagaccaatgatgagctaaaaaccgccgctgaatatcagccgttgattattcattacaacaacggcggcgcggttcgtctgggtgatgtggcgacggtgactgactcggtgcaggatgtgcgcaacgccgggatgaccaacgccaaaccagctattttgctgatgatccgcaagctgccggaagccaatattatccagacggttgacagcatccgggcaaaattaccggagttgcaggagaccattccggcggcgattgatctgcaaattgcccaggatcgctcccccaccattcgcgcctcgctggaagaagtcgagcaaacgctgattatctcggtggcgctggtgattctggtggtgtttttattcctgcgctcgggtcgcgccactattattcccgccgttgtggtgccggtttcgctgattggtacgtttgcggcgatgtacctgtgcggattcagtctcaataacctgtcgttaatggcgctcaccatcgctactggtttcgtggtggatgacgccatcgtggtgctggaaaacattgcccgtcatctggaagcggggatgaaaccactacaggccgcgctacaaggtactcgcgaagtcggctttacggtgctgtcgatgagtctgtcactggtggcggtgttcctgccgctgctgttgatgggcggattgccgggccgactgttacgcgagtttgccgtgacgctttctgtcgccattggtatttcgttactggtttctctgacattaacgccaatgatgtgtggctggatgctgaaagccagcaagccgcgcgagcaaaagcgactacgtggttttggtcgcatgttggtagccctgcaacaaggctacggcaagtcactgaaatgggtgctcaatcatacccgtctggtgggcgtggtgctgcttggcaccattgcgctgaatatctggctgtatatctcgatcccgaaaaccttcttcccggagcaggacactggcgtgttgatgggcgggattcaggcggatcagagtatttcgtttcaggcgatgcgcggtaagttgcaggatttcatgaaaattatccgtgacgatccggcagtggataatgtcaccggctttacaggcggttcgcgagtgaacagcgggatgatgtttatcaccctcaagccacgcgacgaacgcagcgaaacggcgcagcaaattatcgaccgtctgcgggtgaagctggcgaaagaaccgggggcgaatctgttcctgatggcggtacaggatattcgcgttggcggacgtcagtctaacgccagttatcagtacacgttgttatccgacgacctggcggcactgcgcgaatgggagccgaaaatccgcaaaaaactggcgacattgccggaactggcggacgtgaactccgatcagcaggataacggcgcggagatgaatctggtttacgatcgcgacaccatggcacggctgggaatcgacgtacaagccgccaacagtctgttaaataacgccttcggtcagcggcaaatctcgaccatttaccagccgatgaaccagtataaagtggtgatggaagtggatccgcgctatacccaggacatcagtgcgctggaaaaaatgttcgttatcaataacgaaggcaaagcgatcccgctgtcgtatttcgctaaatggcaaccggcgaatgccccactatcggtgaatcatcagggattatcggcggcctcgaccatttcgttcaacctgccgaccggaaaatcgctctcggacgccagtgcggcgatcgatcgcgcaatgacccagcttggtgtgccttcgacggtgcgcggcagttttgccggaacagcgcaggtgttccaggagacgatgaactcacaggtgatcctgattatcgccgccatcgccacggtgtatatcgtgctgggtatcctttacgagagttatgtgcacccgctgacgattctctccaccctgccctcggcgggtgttggagcgctgctggcgctggagctgttcaatgccccgttcagcctaatcgccctgatagggatcatgctattaatcggcatcgtgaagaaaaacgccattatgatggtcgattttgcgcttgaagcccaacggcacggtaacctgacgccgcaggaagctattttccaggcctgtctgctgcgttttcgcccgattatgatgactaccctggcggcgctgtttggcgcgctgccgctggtgttgtcgggcggcgacggctcggagctgcggcaacccctggggatcaccattgtcggcggactggtaatgagccagctccttacgctgtataccacgccggtggtgtatctctttttcgaccgtctgcggctgcgtttttcgcgtaaacctaaacaaacggtaaccgagtaaatgacagatcttcccgacagcacccgttggcaattgtggattgtggctttcggcttctttatgcagtcgctggacaccaccatcgtaaacaccgcccttccctcaatggcgcaaagcctcggggaaagtccgttgcatatgcacatggtcattgtctcttatgtgctgaccgtggcggtgatgctgcccgccagcggctggctggcggacaaagtcggcgtgcgcaatattttctttaccgccatcgtgctgtttactctcggttcactgttttgcgcgctttccggcacgctgaacgaactgttgctggcacgcgcgttacagggcgttggcggcgcgatgatggtgccggtcggcagattgacggtgatgaaaatcgtaccgcgcgagcaatatatggcggcgatgacctttgtcacgttacccggtcaggtcggtccgctgctcggtccggcgctcggcggtctgctggtggagtacgcatcgtggcactggatctttttgatcaacattccggtggggattatcggtgcgatcgccacattgctgttaatgccaaactacaccatgcagacgcggcgctttgatctctccggatttttattgctggcggttggcatggcggtattaaccctggcgctggacggcagtaaaggtacaggtttatcgccgctgacgattgcaggcctggtcgcagttggcgtggtggcactggtgctttatctgctgcacgccagaaataacaaccgtgccctgttcagtctgaaactgttccgtactcgtaccttttcgctgggcctggcggggagctttgccggacgtattggcagtggcatgttgccctttatgacaccggttttcctgcaaattggcctcggtttctcgccgtttcatgccggactgatgatgatcccgatggtgcttggcagcatgggaatgaagcgaattgtggtacaggtggtgaatcgctttggttatcgtcgggtactggtagcgaccacgctgggtctgtcgctggtcaccctgttgtttatgactaccgccctgctgggctggtactacgttttgccgttcgtcctgtttttacaagggatggtcaactcgacgcgtttctcctccatgaacaccctgacgctgaaagatctcccggacaatctggcgagcagcggcaacagcctgctgtcgatgattatgcaattgtcgatgagtatcggcgtcactatcgccgggctgttgctgggactttttggttcacagcatgtcagcgtcgacagcggcaccacacaaaccgtctttatgtacacctggcttagcatggcgttgatcatcgcccttccggcgttcatctttgccagagtgccgaacgatacgcatcaaaatgtagctatttcgcggcgaaaaaggagcgcgcaatgaagttctggcgacccggtattaccggcaaactgtttctggcgattttcgccacctgcattgtcttgctgatcagtatgcactgggcggtgcgtatcagttttgagcgtggctttattgattacatcaagcatggtaatgaacagcgattacaactgttaagtgatgcgcttggcgagcagtatgcgcagcatggcaactggcgcttcctgcgcaacaatgatcgctttgtctttcagatcctgcgttcatttgaacacgataattcggaagataaacccggcccgggtatgccaccgcacggctggcgtacccagttctgggtggttgatcaaaacaacaaagtgctggttggtccgcgagcgccgattccacctgacggtacacggcgacccattctggtcaacggtgcggaagttggcgcggtgatcgcctcccccgttgagcggttaacgcgcaatactgatatcaatttcgataaacaacagcggcaaaccagctggttgattgtcgccctggcaacgttactcgcggcacttgccacttttctgctggcgcgcggtttactggcaccggtaaaacgacttgtcgatggcacgcacaaactggcggcgggcgatttcactacccgcgtaacgcccaccagtgaagatgaactgggcaaactggcgcaagacttcaaccagcttgccagcacactggagaaaaaccagcaaatgcggcgcgattttatggccgatatttctcacgaactgcgtacgccattagcggtgctgcgcggtgaactggaagccattcaggatggcgtgcgtaaattcacgccggagacggtggcgtctttacaggcggaggtcggtacactgaccaaactggttgacgatctccatcagttgtcgatgtctgatgaaggcgctctcgcctatcaaaaagcaccggtagatttgatcccactgctggaagtggcgggcggcgcatttcgcgaacgattcgccagtcgtggcctgaaactgcaattttccctgccagacagtattaccgtatttggcgatcgcgaccgtttaatgcagttattcaataacttactggaaaacagcctgcgctacactgacagcggcggcagcctgcaaatctctgccgggcagcgcgacaaaacggtgcgcctgacctttgccgacagtgcgccaggtgtcagtgacgatcagctacaaaaattgtttgaacgtttttatcgcaccgaaggttcccgcaaccgtgccagcggcggttccgggctggggctggcgatttgcctgaacattgttgaagcacataatggtcgcattattgctgcccattcgccttttggcggggtaagcattacagtagagttaccgctggaacgggatttacagagagaagtatgaccgagttaccaatcgacgaaaacacaccgcgtattttgatcgtggaagatgaaccgaagctggggcagttgctcattgattatctgcgtgctgcgagctatgcgccgacgcttatcagccacggcgatcaggtactgccgtatgtgcgccagacaccaccggatctgatcctgttagatctgatgctccctggcaccgatggcctgacgctgtgccgggaaattcgtcgtttttctgacattccgatcgtgatggtgacggcaaaaatcgaagagatcgatcgcctgctggggctggagattggcgcagatgattatatctgtaagccgtacagcccacgggaagtggtagcgcgcgtcaaaaccattttgcgccgttgcaaaccgcagcgcgagttgcagcaacaggatgctgaaagcccgttgattatcgacgaaggtcgttttcaggcttcatggcgcggtaaaatgcttgacctgacgcctgcggaatttcgtctgctgaaaacgctctctcacgaaccaggaaaagtgttctcccgcgagcaattgctcaatcatctttatgacgactaccgcgtagtaaccgaccgcaccatcgacagccacattaaaaacctgcgccgcaagctggaatctctcgacgccgaacagtcatttatccgcgccgtttatggcgtcggttaccgctgggaagccgacgcctgccgcatcgtttagttttagcgacattattttgttagccggagatggcgttcagaccagatccggcaacattatcccacgcatggtcagcaaactgacattatctctccgccctggcaggcatcagaaaatcgctcatactttaatcggtaaacagcacctttagatgctgttttcgatacacaatttcaatcaaggagtcattatggctggttggtttgaactcagtaagagcagtgataatcagttccggtttgtgctaaaagcgggcaatggtgagactatcctcaccagcgagctttatacctcaaaagcctctgcggaaaagggcatcgcgtcggtgcgtagcaacagcccgcaagaagaacgctatgagaaaaaaacggcaagtaacggcaaattctatttcaatctgaaagccgctaatcatcaaattatcggctccagccagatgtacgccaccgcgcaatctcgtgaaaccggaattgcctccgttaaagccaatggcacaagccagacggtgaaagacaatacgtaattacgatgccgggcgtgggttgttggcgtccggcgctttaccagatccccccacagcgctacaatgcccgcccttaaagtgggggcactcccctaaccgcttcatcaggtgaagcggatctgacctgtcatcagaacgagagaattatgtttaaaccggaactcctttccccggcgggaacgctgaaaaatatgcgttacgctttcgcttatggcgcagatgctgtttatgcgggccagccgcgttactccctgcgtgtgcgcaacaacgaattcaaccacgaaaatcttcagctcggcatcaatgaagcccacgcgctggggaaaaagttttatgtcgtggtcaacattgcaccgcacaacgccaagctgaaaacctttatccgtgacctgaaaccggtggtggaaatggggccggatgcgctgattatgtccgatccagggctgattatgctggtgcgtgagcacttccctgaaatgccgatccacctctcggtgcaggctaacgccgtaaactgggcgacggtgaaattctggcagcaaatgggcctgacccgcgtgatcctctctcgcgagctgtcgctggaagagattgaagagatccgcaatcaggtgccggatatggagatcgagatcttcgttcacggcgcactgtgcatggcctactccggtcgctgcctgctctctggctatatcaacaagcgcgatccgaaccagggtacctgcaccaacgcctgccgctgggagtacaacgtccaggaagggaaagaagatgacgttggcaacatcgtacacaagtacgagccgattccggtgcaaaatgttgagccgacgctgggtatcggcgcgccaaccgacaaagtgtttatgatcgaagaagcccagcgtccgggcgagtatatgaccgcgtttgaagatgagcacggcacttacatcatgaactcgaaagatctgcgcgccatcgcccatgtagaacgcctgaccaaaatgggcgtgcattcgctgaaaatcgaaggccgtactaaatctttctactattgcgcacgcaccgcacaggtttaccgtaaagctatcgatgacgccgctgcgggcaaaccgttcgataccagcctgctggaaactctggaaggtctggcgcatcgtggctataccgaaggtttcctgcgtcgtcatactcacgacgattatcagaactacgaatacggttattcagtttctgaccgccagcagtttgttggtgagtttaccggtgagcgcaagggggacctcgcggcggtagcggtgaaaaataaattctccgttggcgacagccttgagctgatgacgccgcaaggcaacattaactttacccttgagcacatggaaaacgccataggtgaagcgatgccggtcgcaccaggcgatggttatactgtgtggctcccggtcccgcaggatcttgagctcaattacgctctgctgatgcgtaatttctccggggaaaccacgcgtaacccacacggtaagtgattaatttcgattatttttcccggatggaaaattcttagaaaccgatcacatacagctgcatttattaaggttatcatccgtttcgctgaaaaacataacccataaaatgctagctgtaccaggaaccacctccttagcctgtgtaatctcccttacacgggcttatttttttatgcataagccctatctctggtaaccgtcttccattgaccacatcgatagaatcctccttcatagcacgatgcctttcacttatcggcatcgtgctcccacaggttccggctacgcacagccagaacgcgcatatttgacgcttaccaaaaaatattctcactctccacatttgaatgtcagacgagcgacaccatgtaatcctacaccttctgtcttcagctcaactatttgcatttttttgccctgagtaacacagaaatgagttgcatcattttttactatattttctgcaccagatattctacccctggctaaagaagcttcggcttcggtgtagtattggttatcgagtttacgctgaatattacttttatatgcaagaccaaatttaccgatacttgtctcatcattatgcacagcacaaccagacataataaaaatactaattaatgatatagcagctatctttttcatctcaccttcccccattaaataccaacgacactctctagtgtttaaatataataatggcatgattattataattgaataggattataataaatgttctgtacaacatttcctacataagtaggaattacggacattgaggcccttcagggtaactccatgggggctttaatatattatattgaagatgccactgtttagttgaatattaggtatatgctcttttttgaaatttatcggtggcagccgttagtattcgctgtccccattgcaagctcctggtggtaaccactgaatcctccatacttgaactgactttttatcctccgactttcatcctgttctgactccaccttttgttttctgctctacactatctacagaccaatcataaaggcacatacgatcatggcagaatttcccgccagcttactgattcttaatggcaaaagtactgacaatctacccttgcgcgaagcaattatgctgttgcgtgaggaaggaatgacgatccatgtgcgggtcacctgggagaaaggcgatgccgcacgatatgtagaggaggcccggaagttgggcgtcgcaacggtgattgccggtggtggcgatggcaccattaatgaagtttctacggcgttgattcagtgtgagggggatgacatacccgcgctgggaattttgccattaggaaccgccaatgattttgccaccagtgtagggattcctgaggcactggataaggcgctgaaactggcaattgccggtgacgccattgcgatagatatggcgcaggtcaacaaacaaacctgttttattaatatggcgacaggcggatttgggacgcgtattaccacagaaacgccggaaaaattaaaagccgcgctgggtagcgtctcttacatcattcatggcttaatgcgtatggatactctgcaaccggaccgttgtgaaatccgcggtgaaaactttcactggcaaggtgacgccctggtcattggtattggtaacgggcgtcaggccggtggcggtcagcaattgtgtccgaacgcgttaattaacgatggcttgctgcaactgcgcatttttaccggcgatgaaatacttccggctctcgtatcaaccttaaaatctgacgaagataacccgaatattatcgaaggcgcttcgtcgtggtttgatattcaggcaccacacgacatcacctttaatcttgatggcgaaccgttgagtgggcaaaattttcatattgaaatacttccggcagcgttgcgttgtcgtctgccaccagattgcccgcttttacgttaaataaaagcaagcgcagaagcaggattagcagaccggcatcatccctgggatcttctgcgctcacccttttttgttacgcagctacggctaacgctgccagtaattcattcatcgataaatatcttgcactcgccgcattaaagcaggtttgttgggcatcttctgataccacaatggtgtttattcctgccgcctgtgctgcctgaaaaccactcacgctgtcctctataaccaaacaatctgcagcagacagttgcaattctcgcagtgcagaaagataaactgccggatggggtttcccatgcttttcgtcatcagcactacaaatcaccgaaaaataatgctgaatattgagttttgtcagtacagcatcgatcacctggtaagatgaagaggttgccagcgccagttgatagccactccggcgcaaaaaaaataacacgtcctgaacgcctggcatcgcttcgcccgtcccggcaatcaacgtagtgatcaggcggcgaatctcactttccaacagtgcgggttcaatgtgtaaatgacaatattcacaccaggtttgggcaatctcatccagccttttacctttagtcagtcttatacactcttcgtcactgacacatgcgccccaccttgccagtgctcccttttgtgcctcacgccataacccttccgaatcaatgatgacgccgtccatatcaaaaatgactgctttacaattaaacattgttcctcgcaataaagcctggcaccacaccaggcttgtcgtcatcaggaaatggtggcggtcttcccttcacacacttgctgatttgagaatcccggttgttcgacgcgaataaacgggcaaataataaacgctatcacatacagggtggtgtaagcgataaccacaccaatagtactgaaataaggcagaagtaccacggcgattgccggagcaaggaagttggacaacccggctgaaaggttataaaccgaaatagctgctcctttatgtttcggttccagtgccgggaaaacggctgccatcggtacgaatgcagcaacaaagatccccagtgccaccgcaggtatcagcgccatagcaaagttatgaccgaaatgttgcggcatgtagtagaacgccaggcttgaaagcgccattcccacgcaaccaaaccagcgaacaactttcatccagcccattttctctgccagcacgccccagaatacgttagagaagatggtggtaaagaagaagactgcccagacctgcaaccactcagaggtggtaaagcccagctcatcaacaaacatcatcggcataattacggcgaatccgaataaagataaggtgttgataatgcgaacaatactggaaagcaaaatattgcggttggtataaagcaaagtcaccgcacggcccagttcgctaaacttctcttttgtggttaggttttgcatatggcgtggtgtttctactttgcgcatagaaattaacgcaacagcgccaccaaccccacagaaggccagcgccagccataatgttcccatttcgccaataagcggaatggtaaaactggggatgtagctgccgaatacgccgataccaatagagtaaactgcccagaaccagcccagagcagcactggtgctgtcactgcgtacgttatggacaatcgccacaataaaggcgtagaggaacagcggataggctaggccacgaataccataaaacagcaggattaacccatagttcgcctgccccagaccaaagaccagaaacagcacgtgaaatacgcaccacagcacaaagccgataaacatggttttttgtggcgtaataatttcggcaactacgccggaaacccaggcggaaagcgctgccgccaggccatagagcgtaaaggcaaaggaggcttctgcaggcgtgaaacccagtgctttaatgtaatgcgacaggaatgccagttcaaaaccgtctccggtcataaagatggcaatggcaatatatccccacaccagatttaagggtaatcccagccattgtttatttgttaacgacatagtgacctcgtttgtaggatacaaaacgccgctccggtgcaaacaccggagggcatttgtgacagatgttattgattgcgatagttcaggtcgttgtgatacagcgcagtaaactgctgatatcgttgcatcagcgcattatgacgttcaggatcgctgcgccaggttttgaagatttcaggtttttcacacactgccgccagtggttttcccgcagcaagacaggccagacgcgcggctcccagcgccccacccgtttcaccgcctttatgcgtcaccactggcatatcgagaatatcggccagtaactgcgcccagaatggacttctcgcccccccacctaccagcgagcattgctcaattgccgtaccgctttcttgcaggactcgcagcccatcggcaataccaaagctgacgccttccagcactgcatatcccattagcgcacgctgactggagtgtgtcagcccccagaacaatccccgggcatgaggatcgttatgtggcgtacgttcaccagaaagatacgggaggaacatcggtgcactggctttgtctgcatcagaaagttgggcaatctcttccagtaactctgtttccgttacccccaccagacggcagaaccattgcagacaactggcggcactgagcattacactcatctggtgccataaattcggtagtacgtgacagaaagcatggactgctgattgcggcgcaggacgataggcatctgtcactacaaacaacaccccggaagttcccaaagaaataaacgcatctccgggagaaacggcccccacaccaattgcgctcacggcgttatcgccaccgccaccagcaactacaaccgaagatgtcagcccccaacggctggcaacttcaggggaaagagtggcagaaacgtcacaaccttccaccagttccggcatattcgcccgtgtcaggccacatttttccagcaacgaatctgaccagtcgcgtttttccacgtcgagccacaacgtgccagcagaatccgacatatcggaaatcttttggccggtcattttgaaacgcaaatagtctttcggcagtaaaacggtggaaatgcgcgcaaagtgctgcggctcatggcgccgtacccatagcaatttgggggcggtaaatccaggcatcgccaggtttcccgctacctgatgcaactctggtgcgatctcttccagctccgcacactcctgcgcactgcgggtgtcgttccataaaatcgccggacgaatcgcctctcctttttcatccaacaggacggcaccatgcatttgaccagaaaggccaatggctttgatcgcctgccagtggtgaccgcatttttcccgcagggtcgacattaaatattccgtcgcttcccaccaggcttgcggcgattgttctgaccagtgtggatggggccgctgaatggtcagcggcgcactatgggtggcaacaatttcattgttttcatcaatgaccagcgccttaacttccgatgtgcccagatcgatacccagatacataaccgcctcctggttagttaattaacgcgtagacgtcagcgattttttcgcgcaacaacgcggcaaaatcttcacgttcggttaaatcgccaaacagcgctttatcactggcataaacagcgacgggatcggcagactggaacattgcatggacagctggtgcatcaaggatgccatcctgatattcatagggcagtttgccgtgatgccactgctccatgaatacgtaaaacagtgcaggtaacatggcggtggcattcgggcgaacgcctcgctggtagcactctcgcagtgtgggggcaatcatcgccggaattttcgagaaaccatccgcagcgacgcgttggttggtgtcctgaatatgtggattggtaaaacgcttgagtacaacatcacggtaggttggcaaatcgataccgttatcgcccaagcaaggaatgacatcttccgtcacgtagcggtcggcaatctgatagataaaatcggtcattgtgctttcgtggatatatttttgaccgattaacgtacctgcccaggcgatgcaactgtgtgaagagttaagaatgcgaatcttcgcctcttcataggggattaccgacgccaccagttcgacaccgaccttctccagtgccggacggacatcacggaaattatcttccacgacccactggataaaggtttcgcccattaccggcgctttatcggcaatacccgtttgagccttgatccgtgccggaagttctgctgccggacgaggcgtaatgcggtcaaccatggtattcgggcaagtggtatttgtactcagccagtcgatgacatcctgtttgccagttagctggagaaactcaaccaggccatcatggaaacgttcaccattatggcgcacgttatcgcaattcagcagggttagtggtccggcgttatttgccatacgcgcttcgaggatacgggtaataacaccgtaaattgttttgcatccccctttaagatctgccgctaaatcaggattgttaacttccagtttgtgactggtattcaggtagtacccgccttcggtgacggtgaaagcaatcacttttgtcttcggatctgccccttcagcaatcagcggttgtaaatctgcctgccacggtatcaacttctgaattgaggtgatctcttcatattcgcttaccccttccgggctgacggtttccagcacatagcgacctttctgtgcactgagtgcctgtacgacatgttcagcatcattacgaatattgcccgcagcaatgctccagcgtttatcgcccatcacctgcaaacggtgtagataccacgcctgatgtgcgcgatgaaaagaacctaacccgatgtgcagccatgtaaattgttcgttcattgtttcgttctccattgacgttatggctgaactgtaatcgaacatttgagttaattaagagcgttagatcacaaaagaacaattgaccaaaaaaattacaaatgaccaaatcaaagcaataaacttgcctcgcggtaaagctatggccaaaatgacgctaatcagttgcgggattttcacgattccgcacgccacttttgaggtagggaaacgtgaacaaagaagatgacatcaggctcgatcaaaaagtacgggcggcatggatgtactacattgccggacttaatcagagtgaaatcgcaagtcagttaggtacttcacggccagtggttcaacgcctgatagcagcagcgaaagacgaagggattgtgtcgattggattgcatcatccggttgccaactgtctcgattatgcccaactgttaaaggaaaagtaccaattaaccgactgcaatattatgccggtttacagtattgaaagtacgctcgacagcgtgacatttggctgttatcaactgatggcgcgttacttacagggtgacaaaccgaccatcgttggtattggttctggcttaacgttgaagaaaaccattaaacgtatcgattttgatagtcagaatacccgctgtgtggcgctgattagcgccatgaatgaacacgggcaatgtaactattacgacgacgtaccgctgcttttggcgagaaaaattcagggaaaatattaccagtggccagctccacgctatgctcagtcccgcgaagagtaccaaatgtggtcaaccaatcgattgttccgcaacgtctctaccgtagcgcgtgactctgatgttattttcgtgggtattggtgctttaggtcgtcaaagccctattttcaaagatggctttattgatgagcagcaactggaagagttaacagcacgcggaggcgttggtgaaatcctcggacgctttattgatgctgaaggcaatgttgtggaaagccagatcaaccagatgatcaccagccatgatatccgcgaaagcaactgcccacgtatcgcagctgcctgtggtgaggataaacgtccggcgatcctcgcagcattaaaaggtgggtggatcaacggtctggtcaccgatgaacacaccgcacgctggttgctgacacgttaatctcagctgacaacattcaggctcggaatgagttgtggcggtatctcaatgcgacgcagggtggtatcgccagaatccacaatttcaaacactttttcgagcatggcgggtacatcctgacgaaccatatcgatatcgtgcccgagcagagaaacaaaaggatcccagtcaaaacaccccattggcggttgattggctcccgtctgcccggtttgcgccagccagcgaaccaccccttcaagagagattgtcgagttgacgaatagcccgtgaagcgatactgcagagctttggaagacctctttcagtaatccctctacgcgagcagaagagtagccggtaaccagtttatgttcatccggtacggttatccccaaagcctgatgggcatcgacaaaaccacgtaaacgttcagcagtattgttatcgcttatacgtccaccgacaaaagtcaaaggtgccagcttgccatagcgtttctggctgttggctaaaattctttccgtcaataatttcgcccccatatagttatcagaaatgatcgacggcgccagtgttcccggcagatccagattcagtgtcggtacgcccgcttgctggcacatttgggctattttatccggttgagtcgctccggtagcaatgacccaatccacctgccaggagagcatggcgcgagcagcctcaatttccagttctggctgtcgccgcgtacaggtgatgattggcagtaatcctctggcacgcgccatctcttcaaatttttcggcaatcgatccaaagtatcggttgtcatatttcggcacaatcatgccaataacgttggattttttactgcgcagtaaacttgcctgccgattaatggcatatccctgctcttccgcaatacgggtgaccttctcagccagctttgcgctgatgcgtcgctttttccagttgccattcaaaatagcgcttaccgcactggcagaaacgccggttaattctgccaggtcgtaaatggtcgttttcttcgttttctcaacgcgtgtcacaaatttgcctcttcattttgaatgtctcttgctgagaatttaagcaagtgctagatctgcttcatcgattgagcagtttgcttcacacggcagctaaattcccgttcagtgcgtgcaagcaaacagagactataaattcgccctggtaaaaggattatatgatgaatcactctgtgccctctatgaatactccccttaatggcaaagttgcagctatcactggcgctgcgtcaggtattggcctgcaatgtgcaaaaacgctgctcgatgcaggagcaaaggtagtattgattgaccgggaaggcgacaaactgcacaagattgtcgctgagttaggcgaaaacgcgtacgcgctgcaactcgatctcttcaataatcagcaagtcgataacatgctggcggacattatcgaactggcgggtgggctggatatttttcatgccaatgcaggcgcttatattggcggcccagtggctgaaggtgatccagatgtctgggatcgtgtgttaaatctgaatataaatgcggcgtttcgctgtgtccgtgcagtcctgccgcatatgattgcgcagaggtcgggcgatataatttttaccagttccatcgcgggcgtcgttccggttatctgggaaccgatctacaccgcgtccaaatttgccgttcaggcattcgtacacactacccgccgccaggtttctcaatatggcgtgcgtgtgggtgcggtgctgccaggaccagtagtcactgccctgcttgatgactggccaaaagccaaaatggaagaagccctggcaaatggtagcctgatgcaaccgattgaagtggcggaatcagtattgtttatggtgacccgctcgaaaaatgtcaccgtgcgagatttagtgatcctgcctggcagtgtcgatctgtaagggcgcaatcatgacaataaccaaaaccgttattggtgttgatgtgggatcaggcagtgtccgcgccgggatttttgatctcaacggatctctgctatcccatgccacagaaaaaatcacgactacgcggcgcagcggaagccgcgtggaacagtccagccaggagatctggcaggcggtctgttcatgtattcgtaatgcgctcactctggcagacgtttgtgcacaaagtgtggcaggcatcggttttgatgccacctgttctctggtggtactggataaaaacggtgatccattgcctgtcagcccggaaggagatgcaaagcaaaatatcattgtgtggatggatcaccgcgccaccgaacaagcagagcgaatcaatgccactcaccatccggtgctgaactacgtcggtggtaaaatttcgcctgaaatggaaacaccgaaaattctctggctgaaagaaaatatgccagagatctacgaacgtgccggacaatttttcgatctggccgattttctgacctggcgggctaccggtgatttagcgcgttcagtatgcactgttacctgtaaatggacgtggctggcacatgaaaatcgctgggatccagattatttccgcaccattggccttgcagagttagcggatgaagattttattcgcattggtcatcatattgtttctcccggaacaccttgtggaaatggtttaacagcacaagccgcggcagagatgggattactccccggcacacctgtcgctgtagggttaattgatgctcacgctggtggcatcggtacggttggcgtagaaggtggagcgctgaacaatctcgcgtatgttttcggcacttcttcatgcaccatggcatctaccacttctccctcgtttgtaccgggtgtctgggggccgtattacagtgcgatggttccaggtctgtggttagttgaaggcgggcaaagtgctgcgggagcagctattgaccagctacttgatttccatccggctgttgaagaagctcgcgaaatggcacaacgtgtgaatcagcccctccccgtctggcttgctgatcgaatcctcgaaaaaacggcgcaaccatcagatgctgtcgccctggcgaaagggctacacgtggtgccggaatttctcggaaatcgcgcccccttcgcagatcctcatgccagagcggtaatttgtggcctgggtatggagcgagatctggataatttactcgccttgtatatcgctggattatgcggaattggttatggtctgcgccaaattctcgacgctcaaacagcgcagggagtagtgagtaaaaatatcgttattagcggcggtgccgggcagcatccactggtacgacaaattctggcagatacctgcggtattccggtcattaccacgcaatgctgcgaaccggttttattaggctcggccattcttggtgctgtcgccggaaatattgcaccttctgttggcgaagcgatgcaacaattcacccatgtggataaatattattatccgcaagaacgctatcaatctcttcatcatcgtcgatatgaggcctataagcagttgcagcatactgcaaaattactcagagactaattaaccagccgcctgacgctgttttcaggcaatcactaataacgactcactccggtaatatcccggagtgcattcatctgcaccctaaaaacgaggtttatatgtccagaaataataaacagtggttgggtttgccactgcatctgatatggggatatatcgccatcgcagtatttatgactggtgatggtttcgaactcgcattcttatcgcactatattaaatcgttaggcttcacacctgcggaagcctcttttgcctttacgctctacggcctggcggctgccctttccgcctgggtttctggggtagtagcggaaatcatcacgccgcaaaaaaccatgctgattggttttgtcctatggtgcgtattccatgttctgtttctggtctttggattaggacaggcaaactatgggttaatcctgctgttttacgggattcgtggtttagcgtatccgctatttctctactcatttatcgtcgttattattcataacgtgcgtagcgaaaattccagttctgctctgggttggtactgggcggtatattcagtagggatcggtgttgctggcagttatattcccagttttacgataccgattatgggtgaaatgggaaccttatggctggcactggcgttctgctttgctggcggtgtcattgccatgatctccttgcgtcatgttaaaacgcctggacatatgcataatttaactccccgtgagaagtttgcagaattaagtcgggcagtaactttactttataccaaccgcaatatttttctctccagtattgtgcgcattataaataccttatcgttattcggttttgcggtcattatgccaatgatgtttgtggatgaactgggattcaccacctctgaatggttgcaggtctgggcggcatttttctttaccactattttctctaatattttttgggggattgtggcagaaaaaatgggctggatgcgtgttattcgctggtttggttgcctcgggatggcagcatcaagtttagcgttttactacatgccgcaatactttggtcacaactactggatggcaatgattccggcgattgctctgggaacttttgttgctgcatttgtgccgatggccgctgtcttcccggcactggaaccaaaacacaaaggtgctgcaatctcggtttacaacctctctgcgggtatgtctaacttcctggctccggcaattgccgtggtgttattaccgtggtttagcactatcggtgtggtcattgcctatacagcattgtatctattggcctttgtcctttgcgcattcattcgcgttgagcagccaggattcagttctgcgccagtgactgagaaggcattgaatatctcctgaaaaacgaaacgcatcaggcactcatcctctccctcatgggagaggatgatttcacatcaggcaatagtgactttgttatcgagataaacgtcctgcacggcgttaatcagtttcacgccgtcagccatcgatttcttaaatgctttccgccccagaatcagccccattccgcctgcgcgtttgttgataaccgcagtacgcactgcatcgctgaggtcagtttcaccgcctgcagcaccgccggagtttatcaacccggcccggcccatatagcagttagctaactgataacgcaccagatcaatcgggttttcgctggtcaacttgctgtacacgcgatcgtcggtataaccgtaattaatcgctttatagccgccgttattttccgccattttttgtttgacgatatctgcacctatggttgccgccagatggttcgcctgaccagtcaggtcggcggagacatggtaatcaacgccatctttcttaaaggcggagttacgcaaataggcccacagcactgtcaccatgcccagctcgtgcgcacgttcaaaagccgcagaaatttcttcaatctggcgacgtgactcttccgagccaaaatagatagtcgcaccaaccgcaaccgcgcccatgttgaacgcctgctccacgctggcatacagcgtttgatcgtaggtattcgggtaacttagcgtctcgttgtgattaagtttgacgaggaatggaatgcgatgcgcataacgccgcgataccgacgccagcacgccgtaagttgacgccacacagttacagcccgcttcgatcgccagttcaacaatgtttttcgggtcaaagtagagcgggttagcagcaaatgaagctccggcagagtgctcaacgccctggtcaaccggcagaatagaaagatatcctgtgccagccagacgcccggtgttgtacaacgtctgcatattacgtaacaccgcaggcgggcgattattgtcaatcatcacgcggtctacgtagtcatgtccgggaagataaagctggtcagaaggaatagtcatacaacggtgctgtaaaaggttgtcggcgtctttgccaagcaactgcgcaatatctgtcattactatgctcccgtaaattccgattggatatcggctatggattttcctggcccgccttttgcgggcaatcataatcctggtcgttacgggcgagtttttccatcttttggatgttttttcagcgttttctgttggctcgattcatcagaaaaaatgttagcgcggtcaagttttcaccgcaaaggtatttaaaaggtattattaagtggtattgtcatcgcgtaccttacattacctgtcatgaaggaattaaaagatgaaaacaacagcaaagctgtcgttcatgatgtttgttgaatggtttatctggggcgcgtggtttgtgccattgtggttgtggttaagtaaaagcggttttagtgccggagaaattggctggtcgtatgcctgtaccgccattgcggcgatcctgtcgccaattctggttggctccatcactgaccgctttttctcggcgcagaaagtgctggcggtattgatgttcgcaggcgcgctgctgatgtatttcgctgcgcaacagaccacttttgccgggttcttcccgttactgctggcctactcgctaacctatatgccgaccattgcgctgactaacagcatcgcttttgccaacgtgccggatgttgagcgtgatttcccgcgcattcgtgtgatgggcactatcggctggattgcctccggtctggcatgtggtttcttgccgcaaatactggggtatgccgatatctcaccgactaacatcccgctgctgattaccgccggaagttctgctctgctcggtgtgtttgcgtttttcctgcccgacacgccaccaaaaagcaccggcaaaatggatattaaagtcatgctcggcctggatgcgctgatcctgctgcgcgataaaaacttcctcgtctttttcttctgttcattcctgtttgcgatgccactagcgttctattacatctttgccaacggttatctgaccgaagttggcatgaaaaacgccaccggctggatgacgctcggccagttctctgaaatcttctttatgctggcattgccgtttttcactaaacgctttggtatcaaaaaggtattattgcttggtctggtcaccgctgcgatccgctatggcttctttatttacggtagtgcggatgaatatttcacctacgcgttactgttcctcggtattttgcttcacggcgtaagttacgatttttactacgttaccgcttacatctatgtcgataaaaaagcccccgtgcatatgcgtaccgctgcgcaggggctgatcacgctctgctgccagggcttcggcagtttgctcggctatcgtcttggcggtgtgatgatggaaaagatgttcgcttatcaggaaccggtaaacggactgactttcaactggtccgggatgtggactttcggcgcggtgatgattgccattatcgccgtgctgttcatgatttttttccgcgaatccgacaacgaaattacggctatcaaggtcgatgatcgcgatattgcgttgacacaaggggaagttaaatgaaaacagaacgtattctcggtgctctttatgggcaggcgttaggggatgcgatggggatgccctccgagctttggccacgcagccgcgttaaagcacactttggctggattgaccgttttcttcctggaccaaaggagaataacgcggcctgttattttaaccgcgccgaattcaccgacgatacctcgatggcgctgtgtctggcggatgcgttactggaacgtgaaggcaagatcgatccggatctgattgggcgtaatattctcgactgggcgctgcgtttcgacgcctttaacaaaaacgtactaggtccgacctcgaagattgcgcttaacgccattcgcgacggtaaacccgttgctgaactggaaaacaacggcgtgaccaacggcgcagcgatgcgcgtctcgccattaggttgtttgcttccggcgcgtgatgttgattcctttattgatgatgtagcgctggcgtccagcccgacccataaatccgatctggcggttgcaggcgcggtagtcatcgcatgggcgatttctcgtgccattgacggagaaagctggtcagcgattgttgattccctgccttcaattgcgcgacatgcacagcaaaaacgcatcactacgttcagcgcctcactggcagcgcggttggagattgcgctgaaaattgtgcgcaatgccgacggcaccgaatccgccagcgaacagctttaccaggtcgttggcgcaggtaccagcactattgagtccgttccgtgcgccattgcgctggttgaactggcacaaaccgacccgaaccgttgcgccgtcctgtgcgctaaccttggcggcgatacagacaccatcggtgctatggcgacggcaatctgcggcgcgttgcatggcattaacgctatcgatcctgcgttaaaggcggagctggatgcggtaaatcagcttgatttcaaccgctatgccacagcgctggcgaaatatcgtcaacaacgggaggcggtatgagcggcgctcgattacacacgctgctgcctgaattaaccacgcgtcagtcggtgatggtcgtcggcgcggcggtcattgacgtgatcgccgacgcttatgccctcccctggcgtgggtgcgatatcgaactgaaacagcagagcgttaacgttggcggctgcgcactgaatattgccgtggcgttaaagcgcctcggcatcgaagcgggtaatgccttgccgctcggtcagggcgtgtgggcggagattattcgcaaccggatggcaaaagagggcttaatcagcctgatcgataacgccgaaggtgataacggctggtgtctggcgctggttgagccggatggcgaacgcacttttatgtcattcagcggtgtggaaaatcagtggaatcgccagtgtctggcgcgattaaccgttgcgcctggcagcctgctctatttttccggttatcaactggcctcgccctgcggcgaattattagtggaatggctggaaaagctgcaagacgtgacgccgtttatcgattttggcccacgtattggcgatatcccggatgcattactggcgcggatcatggcctgtcgacctttagtgtcgctcaatcgtcaagaggctgagattgccgccgaacgttttgctttatccgcagagataacaacacttggcaaacaatggcaggagaaatttgccgcgccgttgatcgttcgtctcgataaagaaggcgcatggtatttcagcaacgacgcttctggctgcattccggcatttccaacgcaagttgtcgacaccattggggcgggcgacagtcatgccggtggcgtacttgccgggctggcctctggtctgccactggcggatgccgtattactgggcaatgcagtggcgtcgtgggttgtcgggcatcggggcggtgattgtgcgccaacgcgcgaggaactactcctcgcacacaaaaacgtatagatcgctgcgacagtggctaatgctgtattcaataggccgttgctgttggtcaagcgccacttgcttgatcaccagcaccggtattttgctatctaactgaatatgtgactgaaactcggcatctggcatccgggcgctaacgcgggaacgcgtacgttgtgggtaaatgtgctggctgcggaaatagtcataaagtgaaatcccgatggcatcaacatcatgaattaaatgcgccggaacccacgattcctcaatcgataccgcttcttcatcgacatagcgaatacgcttaagcaaaaagacatcacttcctgcttcgaccgccagctgctgcgcgacttcttcgggacatttcacgacacgcttgttaacccatagcgtatcgggctttttcccgcgcaataccacctgctgagaaaaacctcgcgcttctttcaacgagtattcgaagatgttgttgatctgcgtgccgtaaccgcgcgaacgcgtcaccacaccctcttcttccagcgcctgcatcgccttgcgcaccgtaatgcgcgaaacgccggttaactgacttaaatcacgctcaccgggcaaaatattgccatgctccagcaccccgctgcgcacggcattttttaccgtttcggcaaacttaatataaagcggcgtgttatccgccgctaaaatacgctcgttcagttgggcaatcagctgggtatgcgcttgttccatttgtctttttcctgccggggagtctggtgggagtatatcactgcttcttatttaaggcgtttctttaatcccatcaacgaatgcctgcaactcctccaccgtgccattaaatacattaaaatccaccggatcattgatgccatctacctgtccacggtcggaatgctgccagaagcgccaggccattccgtcattgtccggacgacgttgatagtagtgagccacccaccacggatattcattgaaatagcccgccagattggtgtgataaaaaacggctcctgagtaaataatcggctttttccccgtacttttttcgaccatttttagccactgacttacccgcttgcgtaattcttttgccgataattttccccgttcttctacgtccagcacggcagggaaatcgccttgtgagaaatccaccgtttgcagaaataatctcgcctgaactgaagcggataccgacggggagaaataatgatacgccccacgcagcaggccattttcgcggcttagttgccagttacgcgaaaaataggggtccaccagcttttcgccttccgtcgccttaataaaagcaaactgtaagcggataccgttgtcgcgcatttttgccacccgctgccagtcgatccgctcctgccagcgcgaaacatctattccgtgaatggtgtaactggcaggaatgcgaatagcgaaagatttaaccgggcgataaccgtagaagtggatgtagtctgtaatctgaactgctgtcgaatagaaaaaattcaccgtctgacgcggataaattgcaacgatggaaattagcccaagagcgcataatagagaggtgagtttttttcgactggtaattcttagctgcattggtttcatccctgaatgtcagtgccaaaggctgacaataaccaaagcagctatagtacggtgctcaccaccaggcgtggaagtggtgaaccggaccaataccgtgaccaacttccagcgtgtcggcctgggctaacgccgatgaaagccagctttttgcctcctgtacggtgtcagcccagtttgtatggcgcgggcgtagtgcagccaacgccgcagagagtgtacaaccagtgccgtgggtgtttttggtcataatgcgcggtgcggtaaaccgttgttcaccctcgcgggtaaacagccagtccgggctttgctcatcatccagatgaccacctttcattagcactgcgccacagcccatcgccaacagcgatcgcccttgttccagcatttcctgttcggtgcgcgcgtgtggcgcgtcgagcaaggcggcagcttcgggcaagtttggcgttattaatgaaacctgtggcaataatcgactgcgcagcgtagcaaccgccgaaggtgaaagcagcgggtcgccgctttttgccagcataacggtgtcgagtaccacgttttggatctgataacgttgcaaccgttctgccaccgcttcaacaatatcggtttccgccagcataccgattttagtggtatcgattcgcacatcgctgaacaccgaatcgagctgggcggcgacaaaatcaggctcaatgcgatacaccgactgtacgccacgggtattttgcgccaccagtgcagtaataactgagcaaccataagcgccaagtgccgagaaggttttaagatcggcctgaatccccgcaccaccactcggatcagtaccggcaatcgtcagagcgttaattcgtttcatgcctgcacctcctgcgtcaattgccagagcgcatcaaggaaatgtggaacaaaactgcctggcccctcgcttctggcgactgcgcgttctccggcttgtttcatccagtgacaggcagatgcgacattttccagcgtatcgcctggtaacgcacagcaggcagcgacaaccgccgataatgcacagccagttcctaccactttggtcattaacggatcaccaccgtgaataccaatgatacgatgtccatcggtaacataatccatctcgccagtgaccacgacgattgcgccagtttcccgtgccagtgtttgtgcagcgggtatcgcgttagctgcggcgtcagtggtatccactccccgtccgccattagcaatgccagctaatgccatgatttccgaagcattaccacgtatcgctgccggtttaaaagataaaagttcatgacaaaaatggcggcgataatcgagcgcacccaccgctactggatcaagcgtccagggtgtttgagagctttttgcttgctcaacggcagcacgcatcgcctgagcgcgtggctgcgtcagtgtgccaacgttaatcaacaaggcactggcgatagccgcaaactgactggcctcttcggtttcgataaccatcgctggcgatgcaccgagcgccagcaaggtattggcggtaaaggtttgcaccacatcattggtcatgcagtgcacaagaggggaatgttggtgaaaaaggtgtaacgcgtgcgcagattgcgctgaacccagcaggtcgacttgcatagtttgctcctgccataacgtgaagaagcaatgacctggtggtccgtgacttccctacgctggcattatccagatcaggtgatacgggtatttctcagccttcacgcagaagggcaccccgagtcgtttggttgcgatgataaatcgcagaggaggatggtaatgtccagcgcacgcgttgtaaacgaggaaaaacggcagttttacaatcgcgttaataaattatttgatatatgaatccagcaccttcagaacgacatccagatcttcttcacgttttagctcatccccctggtgaacgatgtgttccgtcagatgacctttaatcacttcccgcatcagaccgtttaccgcgccacggatagcagcaatctgttgtaaaactgcagcgcattcgtgcggctcgtcgagcattttcttgagcgccacgacctggccctgaatcttactggcacgcgctttcagtttctgtttatcacggattgtatgagacatggcaacacctggttaacaagaatatgaaaaatcatagcactattaatctactggggggtagtatcaggtactgggggggagtagaatcagattgccgaattaatactaagaattattatcatgaccgaatttacaactcttcttcagcaaggaaacgcctggttcttcatccccagcgccatcttacttggtgcgcttcatggcctggaaccagggcactcaaaaacgatgatggcggcgtttatcatcgccatcaaaggcaccattaaacaagcggtgatgctcggactggcagcaactatttcgcataccgcagtggtctggttaattgcctttggcgggatggtgatcagtaagcgctttactgctcaatcagcagaaccgtggctccagctgatttccgcagtgatcattattagcaccgcgttctggatgttctggcgtacctggcgcggcgaacgcaactggctggagaatatgcacgggcatgattatgagcatcatcatcacgatcacgaagatcaccacgaccatggacatcatcaccatcacgaacatggcgagtatcaggatgcccatgcacgagcccatgccaatgatattaaacgacgctttgatggtagagaggtcaccaactggcaaattttgttatttggcttaacaggtggtcttatcccctgtccggcagcaattaccgtgctgttgatttgcattcagttgaaagccctgacactgggcgcaacactggtcgtcagtttcagcattggcctggcgttaacgctggtcaccgtaggcgttggcgcagcaatcagcgttcagcaggtcgcaaaacgctggagcggatttaacactctcgctaaacgcgccccctatttttccagtctgttgattggcttagttggtgtgtatatgggcgtacatggcttcatgggcataatgcgataactcaatcctttaggcttgcatgttatcttcagcccaggatgattcttaaatcagctatttccgctgactctctgctcgctaaggatgcttttagggcatcctttcatttacactttttacgaaatcatgggatcactaacaaaatatcgcttgtcagttatattgtatggcaggaaagatatgcgactgatattacagatccccaaagtggagagtttatgaccattaaaaataagatgttgctgggtgtgcttttgctggttaccagtgccgcctgggccgcaccagccaccgcgggttcgaccaatacctcgggaatttctaagtatgagttaagtagtttcattgctgactttaagcatttcaaaccaggtgataccgtcccagagatgtaccgcaccgatgagtacaacattaagcagtggcagttacgtaacctgcccgcgcctgatgccgggacgcactggacctatatgggtggcgcgtacgtgttgatcagcgacaccgacggtaaaatcattaaagcctacgacggtgagattttttatcatcgctaaaaaaatccccctcatcatgagggggaaatgcagacaccttgttattttttattattagccacttgctcgtcttgcttgttattagtcgtatttcacgttgattaatgcggttgcctccagtgcgccagatttaactttgtttgtatcgtagacgtagtaactggctgttatcggaattgaaaccgttgtatctgtaagttttgactttgccgcaatttcttttaaatttgtgtatcctttgctgttatcagtgatatttaaaagtgtgactggcgaaccattactttcaagaataaatcctacgccattatcttccgcacctttcagtattgtgttgctgttggttaacaagtcagaacttgataaatacacctgcattttccgtgatgtttgattttgttgacctaataaatttttacaacgcagaataatatccccttttttactatttattgttgctttgttacctgtggctggtaattgtgaaacgggaataccctctaaagtaattaataaatcgtccggtttgcaggttgtggttatcgggttgtatgacaaggtcagattaaaggaatagacacctgcattttgtgccaatgcatttctatagctatttacacatgcatcccatgacttgccacctaataaacacagtagaaattgtactgcggcactcccgcgtgtcgatgatgaagcactggataatgtcgcaacaccattaatcatcactgaaccgccgccccccgcagaaacattcacttttgcattactggccgcaggtgtcaccgttaccgaataaccattggtgaaactggtctgattatttgacaacgtgatgttatttttattggtccattcaaaatgtaaatttaatttaatggtatcgttataaagtccaacaataatatccgacgggctcataggggtgatagtatttgtactcacgcatgacgaatcattaaaattatgctcatatgtcgccatttgtgtttgagtaagtgcaaaatccccctgaacaaccaagttgtgctgaacagataactcactataacatgccgcatagctcacaggcataaccatcatcattaatataaatagcattatgcgaatttccatagaaccacctgactattactggcaaatataatttctactttcatcaatctctttaccgaaggtgattgtgcatgaaagtccttgttgcttatcaattgctacattaaccgatagcggtacttcattggtgcgaataaataactggcttccctgaccgacaacgccaatattatgaccatggatatcattgacttcataaccaaacattaatggttgcccatccgctcttaacgcttttataaaccagggcttgcgctgatcggtatcaaaattaaccagtacaaccgcgccgcgataaggggcggcaattttccggttgccacgtaattctgcttcgctaccgctttgcgacacatccagcatcaggtgattttcccgataaggtgtcattccgtcgtataccaccactccattacggtttgttgtgcgatatttttgcccattgacataagcatctttaattcctggggcattcatcacagcaaacgtttcggaaagacggttcgccagattaacgccacccgaccaggcgacaatgcccccagaaacactggctccagcctgtcgataagtactcgactgactataactgccattcactgtcgcaaccggcgcgttccaggtcaaattcgccccagctgtcgtttcatttccctgatgctgataactcaggttgaccccatagttaaactgatcccggcttccaacggttcctgataatcccgtattatttgaggcaaacccctgatcatcaaacgtcgttgagttagacatatatatttgccgacgaggcgtcgtaacgtcatcaccccaatcaaagggaatcgatataaaaatattaaatcgtttctcttcatgatgattctcgtcataagcctggcttgccgcgagggtatagcttatccgccgccagttattggaataactcaactgataatccttactgctgccgctacgtccccagtaatctcgccataacgtacttaaggacacagaaccccagccttctggcaatgactggctcatattggcagaaaagctatttttacggccaaaatcgttctggtaataatcggcaatgtcatagacatcgttttcatcacggcgataattatctttattgtttgcccaaacgtgatcattaaatgtccggtaatcacgcgatgaataacgccaggccgcaagaccaaaacgcgtcgacgtttggctcacaaatttgttgtaggcaatttgataactttgcccgtcaaacacatcgccgttgtcttgtttactatgcgacttagtggcatcgacggaaatggcaccaatgcgtgtattccagccagtccccaaagtaaacgcgtaataattattcgcgaccatcgagccgccatacagcgtcaataaattattaaaaccatactgataacccacctggacaaattcactttgtttgctcgccccttcaatatggctacgacccgccgcaaaatcatatttcgacacgccgggttgcagcatatttggcaccgctgcataaggcaccagataggtggttaccgaaccgtccgcctctttcacgctgacatcaagatctgctccaccaccggccaactgcaaatctgtaatcgcgaacgggccaggaggaacctctttctgataaacgacaaaaccattctgttcaatagttaccagcgcgttactctgagcaatcccctgcacccgtggcgtaaaattttgtttcgagttaggcaacatctgcatatcacgaaacaaccgcacacctctgaagcgaacagaatcaaaaatatcgcttgatgtgtacatatcacccacgcgaagcgtgccgagaagttgggcaaatccacgttccagatacagggtattgcttttccacacccctggattgttatttgttttactgaaactggcatcagaatgcagttgccaccccagtaaatttaacccgctgttaaaacgtacatatgtactcttgttattacccgacgctttatagtcgctgtaatactgactcagataataagaggtataaaacgcattaataccccgctcccagttttccggtggaacatagccactttccagttcttccacccaggcctgcgggacactgaaatcgagacgaaaaaccccgatatcccaggtatagctcccaccctgaacaagttgctcaaatgttaaacattgcttaccgctggcgaagttatcgctattaatgcctaaccgcttgataacttctcttgataaacatgtttcttgcgggttgtctttaacaataatctcatatttcccgcgccattgcttattgacataaatatcgatgtcatactgccccggtaagggttgattatcatcaagacgaatatttgcaacctgctggtctttcattccacctatcataaaatgggtatcaaaggtttcttcagctgcataagcttcaatgccgagcaataacgctacgattgctgatgcaagtggggtcattctcaacataggcagctcctgcaattaaattttgtcactaatatagttgccatggtcatcgataatggtcagatgccagttatttgcattattacttttgacattaacactctgactttctaagggggcaatcataatagtttcataattgactttgacattattagctttgacatccgaaatcgtcacccaattagctgagtcattttttatcaccaaaccattgccactgcgatttaccagcaattttttaaatgtcgctttatttaccggagcaatacccgctggccggtaaaacaacttaattctgttttgcatcgcaaacttcagtgcattcttaccttcttgctctggactatttggtggaatatccagaacattcagataaaaaatgctttctttattagtgggcagtttattcggcataattttgatttttacttgctgcccggaatttgcccctatttttgccactggtggcgttaacatgaaaggaacctgaattttttctggtggtaatgacgtatcgccatcatcaatccacgcctgcagcagcgaagaacagtttccctggttcatcaactgcaccatcacttctttattttctgccgggtaaataatgcgcgtcccgtagataacaattccggcatgtgcaggaaggaccatagaaaaaatgagtaaagataataatcctttcattttaatgcctcttaaattaaaaggccgccatgggatagcggccatgtttattacctggagaaacttacaattttatttattaatcctgcgccacacgcataaccagagaagataacacatcacctgattgcactgagttatctgtcagtttcaggtattttgctttaaacggaatagcatattgaccttccgctgttttataactctcaatgttaaaaggtgcagaaacatccaggacatcgctgttatcacctaaatagagatagtaacccacggtatcgttgctactggctatcgccttatcgttaccggttattttatcgttggtaatcaacgagagttttacaccagcaacttctttcgggcagctaatttttaacatgctgctggttacaccgactgcatcatcataggtagaatatttagctttaccttcaaagacactggttggtacagtcggcatattaatacttactgaatcaccacccgcttcgaatttacacggagattctgcaatattccccttaatagttaatgttccggtatcaacgtctgcagcaaatactccagcgctcataaaaaaagaagaaaagacagcggcagcaataattgaacgtttcataatatgttccttaataaaatttatttttggttgttaagagtctgtatctcttggaaacaaatttctcacatcaaaaaagttgccgcaatgtaaacacattgttttattgatttaaaacaaattaaccattgcaatataaatacaaaaaatatttaagagtattaactatttatcgcatctatcaattaatgtagatttatgtaaatggtattgttgatatcaataaaaaagccgaaatcatttatataaatgatttcggctttctaaatgcaattaaaatcaggttgccaaattaatcgtagcgatttaacacgattcgacgtttgctatcgctacctgcaacaaccacttctgtcgttacacctttgacgggcgaagaaaacagatgacgggtgtcaacattatacgttaactgaccacaatgctgttgaggttgaccattaaccatagccatactgcatgttgggggactgatcctgccattaatcgctaatgtggcagtctctgaagagaatgcgggagaagccaatccataggcaagaaaaataattcctgacagccaatacttattcattgaacgttatccctgtagtaaaggttatgcctggatagaatgagtgcataacaaactatagctgtacatccactacacagccacgaaggatgataatgaagcattgcctgtatgatcaatcgactttgtagagtttcggacgaaggtccgcagaatattcgcagtattaaataagtgttcattaatgcggcaaaaactaatacaccgcatcaatgtaacatctctgcggtgtatgaagaataaccagaatggttaataggcgttagaccgcgcggaaggaaatctcgcctggaatgacttcaccctgccagtagagctgagctgcaacgcggtcagccagctggcggtagatagcggtaaattcgctctccggacggctgataaccgttggcgtacctttatcgagatcctcacgtaaggagatgtgtaacggcatctgccccagcagctgtatatggtatttttcagccagtttctctgcaccaccggtaccgaaaatcggttcatggtgaccacagttactgcaaatatgcacactcatgttctcgacaataccgagcaccggaacctcgactttctcgaacatcacaatgccttttttcgcatcgatcagcgcgatgtcctgcggggtggtgaccacgactgcaccggttactggaatgttttgcgccagcgtcaattgaatgtcaccggtgcctggcggcatatcaagcaccagatagtcgagatccggccacaaggtttcctgcaacatctgcattaacgccttgctcgccatcggtccacgccacaccatcgcattgtcgtcagtgaccagataaccaattgaattggttgccaggccatgagacataatcggtgccatatgggtaccgtccggcgaagttggacgctgattttctgcgcccaacattgttgggattgatgggccgtagatatcggcgtccagaatgccgactttcgccccttctgccgccagcgccagtgccaggtttaccgccgtggacgatttacccacgccgcctttaccggaactcaccgcgataatgttcttcacaccgttaattcccggctgattcttcacgcgtttcagagtggctatgttatgcgacagtttccagtcgatagctttcgccccggtgatgcgcagcagttcggcgctacattgctcttttaactcttcgaacgcgctatgccagacaaacggcataaccagttccacatgcaacgtgtcgtccatccaggcgacatggtgcaacgctttcagcgtggtgaggttatgcttcagggttgggtgctgaaaattggccagtgtcccggcgaccattgcgcgcaaggcttctggtgatttggcctgggattgttcgttcatcccgactccttttttgtatagataaaccatcagctgatagtttacctgaagaatatagagaagtacttacttaacattttcccatttggtactatctaaccccttttcactattaagaagtaatgcctactatgactcaagtcgcgaagaaaattctggtgacgtgcgcactgccgtacgctaacggctcaatccacctcggccatatgctggagcacatccaggctgatgtctgggtccgttaccagcgaatgcgcggccacgaggtcaacttcatctgcgccgacgatgcccacggtacaccgatcatgctgaaagctcagcagcttggtatcaccccggagcagatgattggcgaaatgagtcaggagcatcagactgatttcgcaggctttaacatcagctatgacaactatcactcgacgcacagcgaagagaaccgccagttgtcagaacttatctactctcgcctgaaagaaaacggttttattaaaaaccgcaccatctctcagctgtacgatccggaaaaaggcatgttcctgccggaccgttttgtgaaaggcacctgcccgaaatgtaaatccccggatcaatacggcgataactgcgaagtctgcggcgcgacctacagcccgactgaactgatcgagccgaaatcggtggtttctggcgctacgccggtaatgcgtgattctgaacacttcttctttgatctgccctctttcagcgaaatgttgcaggcatggacccgcagcggtgcgttgcaggagcaggtggcaaataaaatgcaggagtggtttgaatctggcctgcaacagtgggatatctcccgcgacgccccttacttcggttttgaaattccgaacgcgccgggcaaatatttctacgtctggctggacgcaccgattggctacatgggttctttcaagaatctgtgcgacaagcgcggcgacagcgtaagcttcgatgaatactggaagaaagactccaccgccgagctgtaccacttcatcggtaaagatattgtttacttccacagcctgttctggcctgccatgctggaaggcagcaacttccgcaagccgtccaacctgtttgttcatggctatgtgacggtgaacggcgcaaagatgtccaagtctcgcggcacctttattaaagccagcacctggctgaatcattttgacgcagacagcctgcgttactactacactgcgaaactctcttcgcgcattgatgatatcgatctcaacctggaagatttcgttcagcgtgtgaatgccgatatcgttaacaaagtggttaacctggcctcccgtaatgcgggctttatcaacaagcgttttgacggcgtgctggcaagcgaactggctgacccgcagttgtacaaaaccttcactgatgccgctgaagtgattggtgaagcgtgggaaagccgtgaatttggtaaagccgtgcgcgaaatcatggcgctggctgatctggctaaccgctatgtcgatgaacaggctccgtgggtggtggcgaaacaggaaggccgcgatgccgacctgcaggcaatttgctcaatgggcatcaacctgttccgcgtgctgatgacttacctgaagccggtactgccgaaactgaccgagcgtgcagaagcattcctcaatacggaactgacctgggatggtatccagcaaccgctgctgggccacaaagtgaatccgttcaaggcgctgtataaccgcatcgatatgaggcaggttgaagcactggtggaagcctctaaagaagaagtaaaagccgctgccgcgccggtaactggcccgctggcagatgatccgattcaggaaaccatcacctttgacgacttcgctaaagttgacctgcgcgtggcgctgattgaaaacgcagagtttgttgaaggttctgacaaactgctgcgcctgacgctggatctcggcggtgaaaaacgcaatgtcttctccggtattcgttctgcttacccggatccgcaggcactgattggtcgtcacaccattatggtggctaacctggcaccacgtaaaatgcgcttcggtatctctgaaggcatggtgatggctgccggtcctggcgggaaagatattttcctgctaagcccggatgccggtgctaaaccgggtcatcaggtgaaataatcccccttcaaggcgctgcatcgacagcgccttttctttataaattcctaaagttgttttcttgcgattttgtctctctctaacccgcataaatactggtagcatctgcattcaactggataaaattacagggatgcagaatgagacactttatctatcaggacgaaaaatcacataaattcagggcagttgagcaacagggaaacgagttgcatatcagttggggaaaagttggcaccaaagggcaaagccagataaaaagtttttcagatgctgcggcagcggcaaaagcggagcttaagctgattgcggagaaggtgaagaaggggtatgtggagcaagcgaaggataattctttgcaaccttcccaaacggtaacgggctctctcaaggtagcggacttatccaccattattcaggaacaaccctctttcgtagcagaaacccgtgcgcctgacaaaaatacagatgctgttttaccgtggctggcgaaagatattgctgtcgtttttccgcccgaagttgtacacaccacgttaagtcatcgccgctttcccggagttcctgttcagcaagcagacaaattgccccaattacgtcgcttagcctgtagtgtgtcgcaacgggataataaaacagccacatttgacttcagcgcctgttctttagaatggcaaaacaccgtcgcccaggcgatcagtcagatcgacggcctgaaaacaacacagttaccatcaccagtaatggctgtactcacggcacttgaaatgaaatgcacaagatataaagtgcgtgaggatgttatggatcagatcgtccaggaaggcggtctggaatatgctactgatgtaataatacaccttcaacagattgatattgaatgggattatgcgaataatgtcattattattctgccgtctggcattgcacctagctacttggagcaatattccagatttgaatgacgcctacgtaaacatttatcactgacggaagagtctctctggcaaaaatgtgcacaaaaacttattgccgcaattccacatattccagaatggcggcaaccattaattgctttgttattacccgaaaaaccagaaattgcacatgaaattgcccagcgtctactggggcaaaaaaaattaccctcgcttgagtggttaaaaatagtggcgactgatgagcacattcttgcctcattagaaaaatatcacgaaccatatgccatttttgatgattactattgtggtgcgatatggtcagccaccgtattacaggagcaaggtgttgcagccctgccccgatttgctccctatgccgcaagtgactactgcgccgatgtgttgcgtcatatcaatcatccgttcgcattgacactgcttatacgtgtagccgggcaaactaaacgctgtcacgatcggatgacgaaagccattgctgcgttcccacatgcagcaatggcggcactgacggaacttcttgggcaaaaagaagagaacagttggcgcattatgctaatgacaatgcttatctcacaaccagcactggcagaacaggtcattccctggctctcgacacccgcagttgccgtactgaaatcatgccagcaacaactgacacagccctcaaaccatgccagcgccgatctactgccagccgtagtagtctcccctccctggctttcgaaaaagaaaaaatcgccgattccggtgctggatttagcgccattaggcattgagccaatctgttatctgacagaagaaatcagtaatcaacttttggcgaaatatatctggtattcaaaacacatcacggttagccatgaagaaagtactaccaacctgttggcaaggatgggttttcaacgacggatcgctggtacatatattaaagctcccgaagcggtagttgaggcatggctaaatgaagattattcaaccttactaagtgaatttaaggtgtttcattcacctaccgggcattattggcagttggggattttgacaacattgccgctggagaaagcagtaaaagcatggaatgcccttaccctatctccacataccgataccgaatactccatgttacattttggactcaaagggttacctgggttagtaaactcacttgcacgctatccacaagaagccttgcccatcacgaattacttcgcagcgagtgagctggctcctgccgtcgcccgtgccttcaacaaactgaaaacgctacgcgaaaacgcccgtagctggctgttgaaatacccggaacatgcccttaccggcctgctgcctgcggcgctcggcaaagccggtgaagcacaggataacgcccgcgctgccttgcgtatgcttaccgaaaacggtcatcagccattactgcaagaaatcgcccgacgttataaccagccggaagtaaccgatgcggtgaacgctctgcttgcgctcgatcccttagataatcacccgacaaaaatccccactcttccggccttttatcagccatcgctctggacgcgcccggtattaaaagcaaatgcccaatcactgccagatagcgccctcctccacctcggtgaaatgctccgcttccctcaggaagaggctctgtatccgggattattgcaggtgaaagacgtctgttccgccgactcactggcgggatttgcctgggatctgtttaccgcctggcagaccgctggcgcgccgtcgaaagagagttgggcgttcactgcgttaggcgttctcggtaacgatgacaccgcccgcaaactgacgccattaatacgcgcctggcctggtgaatcccagcataaacgcgccaccgttgggttggatattctcgctgctatcggtagtgatatcgcccttatgcagcttaacggcatcgcccagaaactgaaattcaaagcattacaggagcgggcaaaagaaaaaattgccgacattgccgagagccgcgaactcacggtggcggagcttgaagatcggttagcaccggatctcggtctggatgataacggttcgctgctgctggattttggcccacggcagttcaccgtcagctttgatgaaaccttaaaaccgtttgtgcgtgatgtttccggcagccgcctgaaagacctgcccaaaccgaacaaaagcgatgatgaaacgcgggcgaacgatgcggttaaccgctacaaattgctgaaaaaagatgcgcgtaccatcgccgcccagcaggtagcaaggctggaatccgccatgtgcctgcgccgccgctggtcgctggaaaacttccagctcttcctggttgagcatccgctggttcgtcacttaacccgccgtctgatttggggcgtttatagcgccgaaaaccagctactggcttgctttcgcgtagcagaagataacagctccagcaccgctgacgatgatcttttcaccctgccggaaggcgatatctctatcggcactcctcacgttctggaaatatcaccaacggatgctgccgcctttggtcagctttttgccgactacgaactgctaccaccgttccgccagctcgaccgtaacagctacgccctgacagaagccgagcgcaatgccagtgaactgacccgctgggcaggcagaaaatgcccgagtggtcgggtcatggggctggcgaataaaggctggataaagggcgaaccacaggatggaggctggatcggatggatgatcaaacctttgggtcgctggtcgttaatcatggaaatcgatgaaggctttgcggtaggcatgtcgccagccgaactcagcgctgagcagctcttaagcaagctgtggctatgggaaggcaaagcagaaagatatggctgggggagtaattcaacacaggaagcgcagttctccgtaatcgatgccatcaccgccagcgagctaattaacgatattgaagccctgtttgaataaggaaagagcatggacaaggaattaccgtggctggcggataacgcccaactggaactgaaatataaaaaaggcaaaacgccgctcagtcatcgtcgctggccgggcgaaccagtgtccgttatcactggaagtctcatccagacattgggtgatgaattgctacaaaaagctgagaagaaaaaaacattgtctggcgttatgagaatttttcactggagtggcagtccgccatcacgcaggccatcaacttgatcggcgaacacaaaccctcaatcccggcccggacaatggcggcgctagcctgtatcgcgcaaaatgacagccaacagttgctcgacgaaatcgtccaacaagaggggctggaatatgcgactgaggtggtgattgcacgccagtttattgcgcggtgttatgagagtgatcctctggtagtgacattgcagtatcaggacgaggattatggctatggttatcgctcagaaacctataacgaattcgatctccgactgcgtaagcatctctctctggcagaggaaagctgctggcagcgttgcgccgacaaactcattgccgcactaccaggaataaccaaagttcgccgcccttttattgcgctgatcctcccggaaaaaccagaaatagccaatgagttggtaggccttgaatgcccgcgaactcattttcattctaaggagtggttaaaagttgttgctaatgaccccacagcggtgagaaaactcgaacactactggagccaggatatatttagcgatcgagaagccagctacatgtcgcatgaaaactacttcggctacgcggcctgcgccgcccttttgcgcgaacaaggactggcagccattccgcgcctcgcgatgtatgcccataaagaagattgcggcagtctgctggtacaaattaaccatccgcaagtcatccgcaccttgctactggtggctgataaaaacaaacccagcctgcaacgtgtagctaaataccataaaaacttcccccatgcgacgctcgccgcactggcagaactgctggcgttaaaagaaccaccagcccgcccaggtaatccaatcatcgaagacaaaaagctgcctgcacagcaaaaagcacgcgatgaatactggcgtacgctgttacaaacgctgatggcatcgcagccacaactggcagaagaggtgatgcagtggttaagtactcaaccccagtcagtgctgaagagttatttatcggcaccgcccaaaccggttattgatggcaccgataacagcaatctgccagaaatcctcgtttcaccaccgtggcgtagtaagaaaaaaatgacagctccacgtcttgatttggcaccgctcgaattaactccgcaagtttactggcaaccaggcgaacaagagaggcttgccgccactgagcctgcccgttatttcagcacggaatctcttgcgcaacgcatggaacaaaaaagtggacgagttgtattacaggaactgggttttggggatgatgtatggctgtttctgaattatatactccccggaaaactggatgctgcacgcaattcactcattgttcagtggcattactaccaggggcgggttgaagagatcctgaatggctggaactccccggaagcacaattagcagaacaggcgctccgcagcggtcacatagaagcgttaattaacatatgggaaaatgacaactactcacgttatcgtccggaaaagagtgtctggaacctgtatttattggcacagttgccgcgtgagatggctttgaccttctggctgcgtatcaatgagaaaaagcatctgttcgcgggtgaggactattttctcagtatcctcggattggatgcgctaccaggtctgctgttggctttttcacatcgtccaaaagaaacatttccgttaattttaaatttcggcgcaacagaactggccctgcccgttgcccgcgtctggcaccgttttgcgggccagcgtaatctggctcgccagtggattttacaatggccggaacatacggctactgcacttattccactcgtctttgttaaaccctgcgacaacagcgaagcggcattatttgcccttcgtttactgtatgaacaaggacatagtgaattactgcaaacggttgcaaaccgctgggatcgcgctgatatgtggccagccctggaaaaaatacttacccagaacccgatggaaatttacccggcacgcattccaaaagcccctgatttctggcatccgcaaatgtggtccaggccgcgccttatcactaataatcaaactgttaccaatgacgctctggaaattatcggcgaaatgctgcgctttacccaggggggacgtttttatagcgggctggaacaactgaaaacgttctgccagccacaaacgctggcagcttttgcttgggatctcttcactgcgtggcaacaagctggtgcccccgcaaaagacaactgggcatttctggcgttaagtctctttggtgacgaaagcacggcacgggatctgacgacacagatcctcgcctggccacaagaaggcaaatctgcccgtgctgtcagcggcctgaacatccttaccctgatgaataatgatatggcgctgatacagctgcatcatatatcgcaacgggctaaatcccgccccttacgtgataacgcggcggaatttcttcaggtggtcgcagaaaatcgcgggctaagccaggaagagctagcggacagattagtcccaaccctgggccttgatgatccgcaggcgttgagttttgattttggtccccggcagtttaccgttcgcttcgatgaaaatctcaacccggttatctttgatcagcaaaacgttcgccagaaaagcgttccccgtttgcgcgccgatgacgatcaactgaaagcgcccgaggcactggcccgactaaaagggctaaaaaaagatgctactcaggtgagcaaaaacctgctcccgcgtcttgaaacggccctacgtaccacccgacgctggtcgctggcagattttcattctctgtttgttaatcatccctttacccgtctggttacccagcgattaatatggggggtttatccggcaaatgaaccgcgttgtttactcaaagcctttcgtgtggccgcagagggggagttctgcaatgcgcaagatgagccaattgacctgcctgcggacgctctgattggcattgcccacccgttagaaatgacagcagaaatgcgcagtgaatttgcacagctttttgccgattacgaaattatgccgccttttcgccagttgtcgcgccgcacggtgctgctcacacctgacgagtcaaccagtaacagcctgactcgctgggaaggtaaatccgctaccgttgggcaacttatgggaatgcgatacaaaggctgggagtcaggctatgaggacgcatttgtctataacctgggtgagtaccggctggtccttaagttttcacccggttttaaccactacaatgttgatagcaaagcgctaatgagcttccgttctcttcgagtgtaccgtgacaataaatccgtcacttttgccgaacttgatgtgtttgatttgagtgaggcgttaagcgcacctgacgtcattttccattaaaacacagcgggcagtgatgcaactgcccgttatcaacacgacttaccagcggggaaagcgatgatcgtgcaaaaagagctggttgctatttacgattatgaggtccctgtacctgaagatccgttttccttcagacttgagatccataaatgctctgaattatttacaggttccgtctatcgactggagcgattccggctacgtccaacatttcatcaacgtgatcgagaagatgctgacccgctaataaatgatgcgttgatttatataagagatgagtgtattgatgagcggaaattacgaggtgaatcacctgaaactgtaatagcaatttttaatcgtgaactacagaatatattcaaccaagaaatagaataatatactctaaataattcaaattggtccgatccggcgcaacgtcccaatggcctggattataaatctcattatcttaattgcaacggggtccagccgtggttataattcgttcgttggaacacgatgttgcacaggctgtggtgttaggcctgaaaatagtaaataaaagaacctgcctcaccagcaggtttttttatttactgtgatctgctttccagatatttttcgctcaaacaactaatgcgccaaacatttattgcgcgtaaaatatcgtttatttcattaatacatttcagggatgaatatatgtcaccgcagaataatcatctgcagcgtccgcctgctgctgtgttatacgccgatgaactggcaaaattaaaacaaaatgataacgcaccttgcccgcccggttggcagttaagtttgcctgcggcccgtgcttttatccttggcgacgaagcgcaaaatatcagccgtaaagtggtgattagcccctccgctgtcgaacgtatgttagtcactcttgctaccggccgcggtttgatgttggtgggggaaccgggtaccgcaaaatctcttctttctgaattactggcaaccgctattagcggcgatgccgggttaaccatccagggcggggcatctaccaccgaagatcaaatcaagtatggctggaactacgccctgcttatcaatcatggtccgtcaacggaagcgctggtccctgccccgctttatcagggaatgcgcgacggcaaaatcgtccgtttcgaagagataacgcgtacaccgctggaagtgcaggactgtctgttaggtatgctttctgacagggtgatgacggtgccggaactcactggtgaagccagtcagctctatgcgcgagaaggctttaatattattgccactgccaatacccgcgatcgcggcgtcaatgaaatgagtgctgcgctaaagcgtcgcttcgattttgaaacggtttttccgattatggatttcgcccaggagttggaactggtcgccagtgcttcggcgcgtttgctggcccatagcggtattccgcataaagtgcctgacgcggtactggaattactggtccgcaccttccgcgatctgcgtgccaacggcgaaaagaaaacgtcaatggatacactgacagcgattatgtccaccgctgaagccgtgaacgtggcccatgctgtgggcgtccgcgcctggtttttagcgaatcgcgcgggggagcctgccgacctggtggaatgtattgccggaaccatcgtcaaagataacgaagaagatcgcgcgcgtctgcgccgttacttcgaacagcgtgtcgccacacataaagaagctcactggcaggcttattatcaagcccgccaccgcctgccgtgaggaaagatgcatgagcgagccgttaattgtcggcatccggcatcatagtccggcctgcgcccggctggtgaaatcgttaatcgaaagccagcggccacgatacgtgttgattgaaggcccggctgattttaatgaccgggtagacgaactgtttttagcccaccagcttccggtagctatttacagttattgccagtatcaggacggtgcagcccccgggcgtggtgcctggacgccatttgctgaattttcgccggagtggcaggcgctacaagccgcacgtcgcattcaggcacaaacttacttcatcgatttgccttgctgggcgcagagtgaagaagaggacgattcgcctgatacgcaagatgaaagccaggccttactgctgcgtgccacccgcatggataacagcgataccctgtgggatcacttgttcgaagatgaaagccagcaaactgcattaccctctgcgctggcgcactattttgcccaactgcggggcgacgcctccggcgatgcgctcaatcgtcagcgcgaagcctttatggcccgctggattggatgggcgatgcagcaaaataatggcgacgtgttagttgtctgcggtggctggcacgctccggcactggcaaagatgtggcgcgaatgccctcagaaaattaacaagccagaattgccctcgctggcagatgccgttacaggttgttatctcacaccctacagtgaaaagcgccttgatgtgctggcaggatacctttcaggaatgcctgccccggtatggcaaaactggtgctggcagtggggcttgcagaaggccggtgaacaactgctaaaaactatccttacccgtttgcgccagcacaaattgcccgcttctaccgcggatatggctgccgctcatctgcatgcgatggcgctggcacagttgcgcggtcatacactaccgttacgcactgactggctggatgccatagcaggctcgctgattaaagaagccctgaacgcgccgttgccgtggagctatcgcggcgttattcatcccgataccgatccgattctgctaacgttgatagacacattagcgggtgacggattcggtaaacttgccccttctacgccacaaccgcctctgccaaaagatgtcacctgcgaactggaacgtaccgcaatctcccttccggcggagcttaccttaaatcgctttacccccgatgggctggcgcaaagtcaggtgttacatcggctggcaatactggagatccctgggattgtacgccagcagggaagtacactgacacttgcaggcaacggtgaagaacgctggaaattaacccgcccgcttagccagcatgcggcattgattgaggccgcctgttttggtgccacactccaggaagccgcacgcaataaattagaagccgatatgctggacgcgggcggaatcggcagtatcaccacatgtcttagccaggcggcgttagcgggtctggcgtccttcagtcaacaattactggagcaactcacactattaatcgcccaggaaaatcaatttgccgaaatgggccaggcgctggaagtgctttatgccttatggcggctggatgaaattagcggtatgcaaggcgcgcagatattacaaacgacgttatgcgcgactatcgatcgcacgctgtggctgtgtgaatctaacggcagaccggatgaaaaggagtttcacgctcacctgcatagctggcaagcgctttgccatattctgcgcgatctacatagcggcgttaatttacccggcgtttctctttctgcggcggtagccttactggagcgacgcagtcaggcaattcatgccccggcgctggatcgcggcgcggctcttggcgcactaatgcgtctggaacatcccaacgccagtgccgaagcggcgctgacgatgctggcgcagttatccccggcacaatctggtgaggcgctgcacggtttgctggcgctggcccgccatcaactggcctgtcagccggcatttatcgccggtttcagcagtcatttaaatcaactgagtgaagccgattttattaacgccctgcccgatttacgcgcggcgatggcctggctaccaccacgagaacgcgggacgctggcgcatcaggtgcttgagcattatcaactggcgcaacttcccgtttcggcgctgcaaatgccgttgcattgtccaccacaggccattgcacatcatcaacaactcgaacagcaggcactggcatcgctgcaaaactggggagttttccatgtctgaactgaacgatcttctgaccacccgtgagctacaacgctggcgattaattcttggcgaagcggcagaaacgacgctttgtgggctggatgacaacgcccggcagatagaccacgcgctggagtggctgtatgggcgcgatcctgaacggctccagcgtggtgaacgttccggtggattaggtggctcaaatctcaccacccctgagtggatcaacagtattcacacgctgtttccgcagcaggtgattgagcggctggaaagcgatgccgtgctgcgctacggcattgaagatgtggtgacgaatctcgacgtgctggaacgtatgcagccttctgaaagcctgctacgcgctgttttgcacaccaaacatctgatgaaccccgaagtactggctgccgcccgccggatagtgtgccaggttgttgaagaaattatggctcgactggcaaaggaagttcgtcaggctttttctggtgtccgcgatcgccgtcgccgttcatttattccactggcgcgaaactttgatttcaaaagtactctgcgcgccaacctgcaacactggcacccgcaacacggcaagttgtatatcgaatccccccgctttaacagccgcattaaacgccaaagcgaacaatggcaactggtcttactggttgatcaaagcggatcgatggtcgattcggtgatccactctgcggtgatggcggcctgtttgtggcagttacccggcattcgtacccatctggtggcgtttgacacaagcgtcgttgatctcacggcagacgttgccgatccggtagagttattaatgaaagtacagttgggcggcgggaccaatatcgccagtgccgtggagtatggtcggcaacttattgaacaaccagcgaaaagcgtcattatcctcgtgagcgatttttacgaagggggttcatcatcattactgacgcatcaggtgaaaaagtgtgtccagagcggcatcaaagtgctgggactggcagcgctcgatagcaccgcaacaccttgctatgaccgcgatacggcccaggcgctggttaatgtcggcgcacaaatagccgccatgacgccgggcgagctggcatcatggcttgcggagaatcttcagtcatgaattcactacgtccggaattattagaactgacaccgcaggccctgacggcgttaagcaatgccggttttgttaagcgcagtcttaaggaactggaaaatggcaacgtcccggagatcagccatgagaacgacgctttaatcgccaccttcagtgacggtgtccgtacccagctggcgaacggccaggcactgaaagaggctcagtgcagttgcggggccaacggtatgtgccgtcatcgcgtgatgctggtgttaagttatcaacgactttgtgccaccactcagtctacggaaaaagaagaagagtgggatccggcaatctggctggaagaactggctacccttcccgatgctacccgcaaacgcgcacaggcgctggtcgctaaaggcatcaccattgagttgttctgtgcgccgggtgaaattccctctgcccgcttaccgatgagcgatgtgcgtttttattcccgcagcagtattcgtttcgcccgttgtgattgtattgaaggcacactttgcgaacatgtcgtactggcggtacaggccttcgtcgaggccaaagcgcagcaagcagaatttaaccatttaatctggcagatgcgcagcgaacacgtcacatcatctgacgatccgtttgccagcgaagaaggcaacgcgtgtcgtcaatatgttcagcaattaagccagacattatggcttggcggcatcagccagccgcttattcactacgaggcagcattcaaccgcgcattgcaggcggcagagacctgcaactggcgctgggtgagtgaatcgctacggcaactgcgcgccagcgttgatgccttccacgcccgcgccagccactataatgccggagaatgcttacatcagcttgcggcattaaacagtcgattaaattgcgcacaagagatggcccggcgcgacagtattggtgaagttcctcctgtgccgtggcgcacggtcgttggctctggcattgccggagaagcaaagcttgatcatctgcggctggtgtctttaggtatgcgttgctggcaggatattgagcattatggtttacgcatctggtttaccgatcccgacaccggcagtattttgcacctttcgcgcagttggccgcgaagtgaacaggaaaactcaccggcagctacgcgtcggctgtttagttttcaggctggcgcactggcgggcgggcaaattgtttcacaagcagcaaaacgcagtgccgatggcgagctgctgttagctacccgcaaccgcttaagcagcgttgtgccgctgtcgcctgatgcctggcaaatgttgagcgcgccgttacgccagccgggcattgtggctttgcgggaatatttacgccagcgtccccccgcctgcatacggcctcttaatcaggtcgataacttatttattctgccggtcgctgagtgtatttcgctcggttgggatagcagccgccagacgctggatgcgcaggtaatcagcggcgaaggtgaagataatctgctgacgttatcactgccagcctcagccagcgcgccttatgccgttgaacgcatggcggcgcttttgcaacaaacagacgaccccgtgtgtctggtttctggctttgtcagttttgttgatgggcaattgacactggaaccacaggtaatgatgacaaagactcgtgcctgggcgctggacgctgaaactgcgcctgtggcaccactaccttctgccagcgttttgcctgtgccgtctactgctcatcagttgctgatgcgctgccaggcgttacttattcaactgctccataacggctggcgctatcaggaacagagcgctattagtcaggcagagttgctggcgaatgacctcaccgcggtgggtttttatcggctggcacatgtgttggggcaatttcgtaatacagaaagcgaggcacgggtagaagcaataaataacggtgttttgctttgcgaacaattattccccatgcttcagcaacaaggatgaaatagtgctttttactaagagctctactccagttccggactgctcacgccacggtattaggcatatcctatatagcccctggtgagagtcaccagtttcttgattaaataaaatggagttttacatgaaggctttcaataagctgttttccctcgttgttgcatctgttctggttttctctcttgctggctgcggtgacaaagaagaatcgaagaaattcagcgccaatctgaacggcactgaaattgccattacctatgtctacaaaggtgacaaggtgcttaagcaatcttctgaaaccaaaattcaatttgcctccattggtgcaaccaccaaagaagatgctgccagggcacttgagccgttaagcgccaaatacaaaaacatcgcgggtgttgaagaaaaattaacctataccgatacctacgcgcaggaaaacgtgactatcgatatggaaaaagtggattttaaagccctgcagggtatttcaggaatcaacgtttctgctgaagatgccaaaaaaggtatcactatggcgcaaatggaactggtgatgaaagccgctggtttcaaagaagtgaaataatctgtcggcggccatgtttcgcatggccgccatacccgtcttagcttttcttcacatgctggcgcgctgccagtccacgcagaaaataacgtaaaaattgatcgccgcattcgcggaagtttttatgatccggtgcgcgcatcatcgctgtaatttccggcatcgaaacgcggaactgctgttcggtgaggatcgccagaatgtcatcggttttcagcgaaaacgcgatgcgtaatttttttagcacgatgttgttattaatgcgacgttccggctccagtgccggagcagactcatccttgccgcgtttttcataaatcaggccattgaggaatgacgacaaaacaatgtccggacaacgctgaaaaccctcttcgtcttctttacgtagccagacggcgatctgttccgcggtggcttcgacattacccagcgccagaatacgcaccaggtcattattattggctttcaaaatgtagcgcacgctgcgcagaatatcgttacttagcatgaggccttcaggtgttgatgaggcaaaaagccattttagcagtcttttacaggccaatcgcctcttttaagcttttcagataacggcggctgaccggcacggttaagccattacgcaaaatcaactcggcctgaccgttatcttccagacgaatctcctgtaaatgcgcgaggttaaccagatactgacgatggcagcgcagtagtggtgtacgactttccagggtacgtaatgtcaattcggtaaagccctctttcccttcgtggctggtaacgtagacaccgctcatccgactgctgacaaatgccacatctttcatttgcagcaaataaatccgactatgccccgtacaagggataaatttcagcgcctgttgattttccggtaacagcgaaacatcctgcttgctgcgttcctgacgcaaacgcgccagcgttttctccagtcgcgcttcatcaattggcttcagcagataatcaaaggcatgttcttcaaaggctttaatagcgtattcgtcaaacgcggtgagaaaaacaatatacggacgatgttccgggtcaagcatccccaccatttccagaccactgatgcgcggcatctggatatcgagaaacagcacatccgggcgcagtttatgcaccgcgccgatcccttccacggcgtttgaacactctccaacgatttcaatatcgctctgctcctgcaaaaatacgcgcaggttctcccgtgctaacggttcatcatcgacaattaagactttaatcatgcctcgtccctccatggtagtcgtaacgttattcgggtgtaactatcaggctcacaggcgacgcttatcccatagtcatcgccaaaccgttcacgtaaacgcttatccaccagattcatccccagcccactggcattggttaccggttgatacaaaccggcattgtcttcgatctccagcatcaaatgttgcccctcacgtcgggcgctgattgccactcgccctgtatccagcagttgtgatgtcccatgtttaatggcgttttccactatcggttgcagggtaaacgcgggcaattgctgctgggataattcttgcggaatagcaatgttgacctgcaaccgcgactggaagcgcgccttttcaatttgcagataagcattcacatgttcaatttcgtcggcgagagtaacaaactccgaaggccgctttaagtttttgcggaaaaaagtggaaagatactgcaccagctggctggcctgttcgctgtcgcgacggatcaccgctttaatggtgttaagcgcattaaacaaaaaatgggggttcacctgggcgtgaagcagtttgatctctgactgggtgagcatcgctttttgccgctcatattgcccggcaaggatctgcgccgaaagcaattgcgcaatcccctcacccaacgtgcggttgattgaactgaataaacggtttttggcttcatacaatttgatggtgcccatcacccgctgattttcaccacgcaacggaattaccagcgtcgaccccagtttgcattgcggatgcaaagagcaacggtaaggtacttcgttgccatcagcgtagaccacttcaccggtttcaatcgcttttaaagtataagttgaagaaatcggtttgccgggtaaatggtggtcgtcaccaattccggtaaaggccagcaatttctctcgatcggtaatcgcgactgcaccaatatccagttcctgatacagcacctgagccactttcatgctgttcacttcgttaaacccctggcgcaaaatgccttccgtcgaggctgccactttcagcgcagtggcagaaaaagccgaagtgtatttttcaaacatcgcgcgtttatcgagcaatatacgcataaacagcgccgcgccgacggtattggtgaccatcattggcgcagcaatattactcaccagacgcaccgcatcttcataaggtcgggcgatcgcaaggatgatcagcatttgcaccatttcagcgacgaacgtgacggcaccggcggtaatggggttaaagactttatcagtgcgcccgcggcggatcaggatgctgtgtaccaggccaccgagtaatccttcaacgatggtcgagatcatgcaacttaacgcggtcatgccccccatcgaatatcgatgtaagccgccggtcagcccaaccagcccaccgacgaccggaccgccgagtaagccgcccattaccgcgcctatcgcacgggtattggcaatagaatcgtcaatgtgcaacccaaaccaggtgcccatgatgcagaagatggaaaagacgatgtagcagagaaatttatgcggcagacgaaccgtgacctgcattaacggtatgaataatggcgttttactcattaaccatgcaatgactaaaaaaacgcacatctgctgaagcagcagcaacaccagattaaaatcgtacatacccgcaaaccacacttccctttaaaacgcgtaacatacattgcctgcgtttaactttctttgaactcttgcagaaaaatgagaattcgtgagtacgatcactcaaaatcgcctggcaaaaataaaatcaccctatagatgcacaaaaaacgggcaaaactacctggttcgcaaaactgcgtctaaagttaaaccgggacctcgcgagcaagggtgagacgatggcgctttacacaattggtgaagtggcgttgctttgtgatattaatcctgtcacgttacgcgcgtggcagaggcgttacggattgctgaaaccgcaacggacagacggcggtcatcggctgttcaacgatgccgatattgaccggatccgcgagatcaaacgctggatcgacaacggcgtgcaggtcagcaaagttaaaatgctgctcagtaatgaaaatgttgatgtgcagaacggctggcgcgatcagcaagaaacattactgacttacctgcaaagcggcaatctacatagcctgcgaacgtggatcaaagagcgcggtcaggattaccccgcccagacactcaccacacatctgtttattcctctgcgccgacggcttcagtgccaacaaccgactctccaggcgctgctggcgatcctcgacggcgtactgatcaactacatcgccatttgtctggcttcggcacgtaaaaaacagggtaaagatgcgctggtggttggctggaatattcaggataccacccgtctgtggctggagggctggattgccagtcaacaaggatggcgcattgatgtcctcgcccactcgctcaatcaactacgccctgaactattcgaaggccgtacattgctggtgtggtgcggtgaaaatcgaacctccgcccaacagcagcaactcaccagttggcaagaacaaggccatgatattttcccactcggcatttaatgattcgttaacaaatgcgctttactgtacaatcctttcgttaacataaggagtgcattatgcgcatagctaaaattggggtcatcgccctgttcctgtttatggcgttaggcggaattggtggcgtcatgctcgcaggttatacctttattttgcgtgctggctaagcgcctgcaccagcctttcaaacaggcagtctgcgatgatcgccgccagtgccaccagtaacgccccctggatcacatacgcggtattaaatccgctaagcccgatgatgatgggcgtacccagcgtgctggcccctaccgttgaggcgatcgtcgccgtaccaatgttgataatcaccgaagttcgcacgcccgccagaatcaccggagccgccagcggtagctcgaccttacgcagtcgctgaccacgactcattcccatacctttcgcaacttctgtcacgctggcatcaatcgctcccagcccggcaagtgtcgcctgcaggacgggcagcacaccgtaaaggatcaaggcgataatcgctggttgcagaccaaagccgatcaccggaacggcgatcgccagcactgcgacgggcggaaaagtctgtccaacggcggcaatagtttccaccagtgggcgaaattccgcgccccacgggcgagtgacagcaattccggcaccagtgccaatgatcaccgcaaacaaactcgaaattcccaccagccagaaatgagccagtgccagagctgcaaaactttcttgctgataaacgggtcgtggcagttgtgggaacaaggcagcaaacagcggctggctgtaaggcagccagaaaatcagcgccacaaacagagcaatgagccagaacagcggatcgcgcaacatcttcatacgcttacgcctccaccagcagatcctgaaaatgcagcgtgccgcaaggctggccctgcatgttcaccaccggcagcacctcgcatccccgcgcaacaaacagagagagcgcatcgcgtagcgtcatctcttctgccagtgcctcaccatctgctcgttcttcgcgacgcacgtaatccgccacactacgtaacgaaagcaggcgcacacccagttcactacgtccaaaaaactggcggacaaaatcattcgccggacgagtcagcatcgtcagcggattgccctgctgcactacttcaccgtgatccatcaataccagatgttctgccagccgtagcgcctcatcaatatcatgagtgaccagcacaatggtacgccccagcaaacggtgaatgcgcgtcatctcttgttgcaacgcgccgcgcgttaccgggtccagtgcgccaaaaggttcatccattagtaagacttgcggatcggcagccagtgcacgcgccactcccacacgttgctgctgaccaccggaaagctgatgcggataacgctcacgcaaatttgactccagccccagtagcgccattaattcgtcgatacgatcgtcaatccgcgcccgcgaccatttttgtaattgcggcacggtagcgatgttttgcgccacgctccagtgggggaacaggccaatagattgaatggcatagcccatccggcggcgcaactccagtactggcagcgagcgaatttcttctccggcaaagcggatctctccgctgtcatgctccaccaggcggttaatcattttcagggtggtggatttgccggagccagatgtgccaatcagcaccgaaaaactcccttcctgaaaattgagattgagatcgttaacggctttttgtgcgccgaacagtttgctgacatggctaaattcaatcattacgtttcaccttcagcagtgcgataagcaaatcgaacagcgcgtcggtaagcaccgccagaacaattaccgggatcacccccagcaacactaaatcaatggcgctgcttagcagcccctggaaaaccagcgcaccaaaaccgcctgcgccgattaacgccgcaatcaccgccatacctacagtttgcaccatcaccacccgcaggctgcgcagaaataccggtaacgccagcggtaactgaacatgcaggaaacgctgcgccccgctcatccccatcgctctggcgctttccagcacatcgcgcgggatctggttcaaaccgactaccacgccgcgcaccagcggcagcaaggcatagagcaccagcgcaatcagtgcgggtgtcattccggttcctgctatgccgagcgtccccagccacggaaaggccgtaaccagcgcggcaagcggcgcaatcaacaggccaaagagcgccaccgaaggcacggtctgaatcacattgagcagagaaaaaattgccccctgccgagctgtggaaaagtagcaccagatgcccaacggcacaccaatcactaacgcaggcagcaccgcaccaaacagcaacgtcagatgttgtgccagcgcgtcgtcaaacacatcctgacggttggcgtattctttcattagtgagagatcgttaagcgtgccggagtacagcaaccacagcggaataatggcaatctgcatatgcaacaaccagcgccacagcggatgcgtggagattcggcggatggcatcgctacaggccagcaatgccagcgccgcagccagccagaaaccactgccgaggctggtacgcgccagcgcactgccattttgcgccagttgggtcgccgcctttccagctccccacaccagcaatacgaagacgaattgcgccagaatgagtgcacaaatgctgccttttttaccgggaataaaacaggccgtcagccaggcgcaaccaacgcccaccagcatccagatcgtttgcggccacagctgccagagatgacgcccctcacccgaaactaaacgattaggcgcgtaactgataaacggcagcgccgctgcgattgccgtcagcaacagcagcagcgccagaacaggattaatacggaaataagtcacgggaaattacttcgtccaccctttttgtttcaggtagtcggcagccacttttttggcatccagtccttccacagcaatgctggcattcagttgctgcaatgtttttgcatcgaggctggcgaagactggctgtagccactgtgccatttgcggatactccctcaacaccgactcacgcaccactggtgcaggcgcgtagataggttgcacaccttgcggatcgcttaaggtttgcagccccagcgccgctaccgggccgtcagtgccgtaagccattgcagcattaacgccagaggtttgctgggcagcggctttgatcgtcaccgccgtgtcgccaccagccagtgacagcaactgatcctgaccgagcttaaagccataggctttttcaaacgcgggtaacgcatcggcgcgttcgataaactctgccgaggctgccagtttgaaggtgccgccctcttgcagataacgactcaggtcggcaagcgaagtgagtttatttttctctgccacatcctgacgcacggcgatagtccaggtgttatttgcaggcgcgggcgtcagccagattaacttgttgtgctccgaatcgagctttttgactttctcgtaaccttgctgcgcgtttttccacgctgcatcgttttcatctttaaagaagaaagcgccattgccggtatattccggatagatatccagttcaccggaagtaatcgccccgcgcaccacaggagtcgttccgagttgcactttattcaccgtcggtacgccgtggctttccagcacctgcaaaatgatattgccgagtagcgcaccttcggtatcgatttttgaaccgactttaacgggggaagccgcctgtagcggcaggctcacggctgccaacataaccagtgaacctgcccagagctttaagagtggcatgatgcttttctcattcttttactgttgttttcagcgaattaagagaaaagcatagttgataatggcggggttagcttgagcggaaggattcagttgcagaatcagataaatacttaagaggcatattcggtccggcgtttcctgccggatgcggcgcgagcgccttatccggcctacaaagggcgcaaacgtcgcgcccttactaaagcattacagcaactcaaactcgcctttcttaacgcgtgcggaatcagtgccgataaagacattgaacttgccaggctcggcgtcatatttcatctgttgattccagaacttcagcgcctcaatatcgatcgggaagctgacagtctgagtttcgcccggtttcagggtgattttctcaaagcctttcagctgtttcacagggcgactcatggaagccgtcacatcctgcaagtacatctgcactaccgtggcaccctcgcgcttaccggtgttcgtcacctgcacgctggcagtcactttgccgtcacgcttcatggtcggcgcagaaagtttcacatcagagacggtgaaagtggtgtagctcagcccatagccgaacggatacaacgccccgttagcttcatcaaaataacgcgaagtgtatttgttcggcttgtcggcattatacgggcgaccggtattcagatggctgtagtacaccgggatctgcccgacagaacgcgggaaggacattggcagcttgccggacgggttgtaatcgccaaacaatacatcggcaattgcattaccgccttcagtccccgcaaaccaggtttccagaatcgcatcagcctgctgatcttctttcaccagcgccagcggacgcccgttcatcagcaccagcaccagcggtttaccggtggctttcagcgccgcaatcaagtcacgttggctttgcggaatagtgatatcggtccggctggaggcttcgtgcgccatcccctgtgcttcaccgactacagccaccaccacatcagattgtttcgccgtctgcaccgcttcatcaatcatctcttgcggcgaacgcggatcgactttgaccgcttcttcatactgattcaggaaatcgataatgcctttgtcactggtaacgttcgcccctttggcatacagcactttaccgttttcaccgacggcatttttaatcccggtcagtacggtcacggattgatcggcaacaccggctgcggaccagctgcccatcacgtcacgtttactgtccgccagtggcccaaccaccgcaatggtggccgattttttcagcggtaacgtttcgagacggtttttcagcaacaccaagctttcgcgcgccacttcacgcgcttctttacggtgcaggcggctttcggcattggtatccaccgggtcagactctttcggccccaaatggctgtatgggtcgttaaacaaccccatatcatatttaacgttcagtacatggcgggcagcatcgtccagctctgccatcgtcactttgccggatttaatcaacccaggcagatacttcgagtagtactcgtcgctcatgctcatgttgattccggatttcagcgccacgcgcaccgcatcttccgggtctgccgccgtgccatgtttaatcagctctttgattgcaccgtgatcggaaacggtgatgcctttaaagccccactggtcgcgcagaacatctttcagcagccaggaatcggaggtggctggcgtgccgttcagcgagttcagcgccaccatcaccgcgccgctgcctgcgtccagccccgctttgtacggcggcatataatcattaaacaggcgctgcggactcatatcgacggtgttgtactctttaccgccttctaccgcgccgtatgcggcaaagtgtttgacgctggtcatcaccgagtagcgatctgccgggcttttaccctgcatcgcttccaccatggttttacccattgttgaggtgagatacgtatcttcgccaaaaccttcggaagcacgtccccagcgcggatcgcgcgagacatcgaccatcggtgcccaggtcatattcaggccatcatctgccgcttcataagcagagacacgtccgaccgttttcactgcatcgaggttaaaagacgaggccagaccgaggctaatcgggaacaccgtgcgctgaccgtgcagcacgtcgtaagcaaagaaaagaggaattttcaggcggcttaattccatcacctgatcctgcatggcgcggatatcctgacgggttacggtgttgaaaatcgccccaacctgaccgtctttgatcatctcgcggatcgcctctttcgggttatccgggccgacgctgattaagcgcagctgaccaattttctcatcaactgtcattttcttaagcagttcggtgacgaacgcatcccgcgcttcgggcgttaatggatggttgccgaataaatcatccgccagtgctggctgcagggccagactcaccgcgattcctactgaacatagccatttcatatggatttttcttcctttgttgcccgacgtggcagcgaaaatggtgcaaaaaccgtagtttgccataagcatgatggagagagaaaaagaatgctcagtttattgtctgaattttcaaaatattcactcgctgaattgttatacaaggcgctattctagtttgtgatattttttcgccaccacaaggagtggaaaatgtcttccatgacaacaactgataataaagcctttttgaatgaacttgctcgtctggtgggttcttcacacctgctcaccgatcccgcaaaaacggcccgctatcgcaagggcttccgttctggtcagggcgacgcgctggctgtcgttttccctggctcactactagaattgtggcgggtgctgaaagcctgcgtcaccgccgacaaaattattctgatgcaggccgccaatacaggcctgaccgaaggatcgacgccaaacggtaacgattatgatcgcgatgtcgttatcatcagcaccctgcgtctcgacaagctgcacgttcttggcaagggcgaacaggtgctggcctatccgggcaccacgctctattcgctggaaaaagccctcaaaccgctgggacgcgaaccgcactcagtgattggatcatcgtgtataggcgcatcggtcatcggcggtatttgtaacaactccggcggctcgctggtgcaacgtggcccggcgtataccgaaatgtcgttattcgcgcgtataaatgaagacggcaaactgacgctggtgaaccatctggggattgatctgggcgaaacgccggagcagatccttagcaagctggatgatgatcgcatcaaagatgacgatgtgcgtcacgatggtcgtcacgcccacgattatgactatgtccaccgcgttcgtgatattgaagccgacacgcccgcacgttataacgccgatcctgatcggttatttgaatcttctggttgcgccgggaagctggcggtctttgcagtacgtcttgataccttcgaagcggaaaaaaatcagcaggtgttttatatcggcaccaaccagccggaagtgctgaccgaaatccgccgtcatattctggctaacttcgaaaatctgccggttgccggggaatatatgcaccgggatatctacgatattgcggaaaaatacggcaaagacaccttcctgatgattgataagttaggcaccgacaagatgccgttcttctttaatctcaagggacgcaccgatgcgatgctggagaaagtgaaattcttccgtccgcattttactgaccgtgcgatgcaaaaattcggtcacctgttccccagccatttaccgccgcgcatgaaaaactggcgcgataaatacgagcatcatctgctgttaaaaatggcgggcgatggcgtgggcgaagccaaatcgtggctggtggattatttcaaacaggccgaaggcgatttctttgtctgtacgccggaggaaggcagcaaagcgtttttacaccgtttcgccgctgcgggcgcagcaattcgttatcaggcggtgcattccgatgaagtcgaagacattctggcgttggatatcgctctgcggcgtaacgacaccgagtggtatgagcatttaccgccggagatcgacagccagctggtgcacaagctctattacggccattttatgtgctatgtcttccatcaggattacatagtgaaaaaaggcgtggatgtgcatgcgttaaaagaacagatgctggaactgctacagcagcgcggcgcgcagtaccctgccgagcataacgtcggtcatttgtataaagcaccggagacgttgcagaagttctatcgcgagaacgatccgaccaacagcatgaatccggggatcggtaaaaccagtaaacggaaaaactggcaggaagtggagtaaaaattacggatggcagagtatcgccatccgaattcacttaatcgttctgtgccgtctgccccgccgccgccatttgggcggctttttgttttttatagctcaacgctgctgccggcacaggcatcactttaccggtttcaatccaggtacgcaggcggctggcatcggcaaaatgggtatatttgccaaacgcgtccatcactaccagcgccaccggtttattattgataaccgtacgcatcaccagacaatggcccgccgcattggtaaagccggttttggttaactgaatattccagttatcgcgatacaccagatgattagtattgcggaacggcagcgtatacgtcggattagagaaggttgccatatcttcccgggtagtacttaactgcccgatcaacggatattgtttgctggcaatgagcagtttggttaagtcacgggcagttgaaacgttatgcaccgacaatccggtaggttcaacaaagcgcgtgttgttcattccgagcgatttcgctttcgcattcattgccttaataaaggctttgtaaccaccgggataatggtgcgcaaggcttgccgccgcgcggttttctgaagacatcagcgccagcaacagcatatctttacggctgatttcgctattcagtcgtacgcgcgaatagacccctttcatctccggcgtctggctgatatccacttttagtttttcatccagcggcagtcgtgcatccagcacaaccatcgcggtcattaatttgctgatagacgcaatcggacgcaccagatccgggtggttcgaatagatcactttgttggtattcagatcaacaatcatcgcgctaccggaggcaatttccggttgtgaagcggtggtagcggctgccgttttcgcaacggcctgcggtgcaaaaggcacagccagcatcagggccaggctaaataaagaaactcgaaatttcggcatgatgagcattcagatagtggttcacgcgcacgggttgcgcaccgccggagtaaggatttactgaggctagcgacgccatcataacgagcaaaaagtgcgatcgtcaaaggagaatcgtgaggaaatgctgcattgctgacatttacgccagcaatgcaacgtcaaagaactttctagaacaaacgataaccgtagccccatagtataacggttagggcgagcagcacttccagtaccagcacgccaatcgccagcgtcgaactagagaagctaaggccttcctctttgttgatattcaggaagctcggaataccaaggtaaagcaggtagccggtgtaaaacagcgccaccgtgccgaccagcgcacacaaccagaccagtggataaagcgccaccagaccgcttaaaaacagcggagttgcaacgtagcccgcgaagaccatgcagtgcgcaagtgacggacgctgcggataattacgcgccatccaccagatgacccgccccatcaccgcgaccccagccagcataacgccgtaaaacaagacagccagcgccagtccggtaaaccaggataacttcaggatagtgccatcgccaaaattccagccaatctgtgtagtgccaatgaaggcgcaaatcaccggaatcgccgccatcagcaaaacgtggtgggtgtaatggtgagaaatcgtttcgttttcgcgattaatcacctgcatttcacgatcgggatgggaaaacagtccccagacatggctcataccgcccccttgttgtgagttcatgaacctgacagttcaagtataagtcagcttgtgattattttttgttcgcccatgtaattttcactgtctgatgaacgtcctttttcagcgtgaatgattcacagggtgtatgcttactggcaaccaaagggagacagactggcctatggatctcaatacacttatctcacaatatggttatgccgcgctggtgatcggtagcctggcggaaggtgaaaccgtgactttgctgggaggcgttgcggcgcatcaggggctattaaagttcccgctggtggtactttctgtggcgcttggcggcatgattggcgaccaggtgctctatctgtgcgggcggcggtttggcggcaagctgttacgccgtttctcgaaacatcaggataaaattgagcgggcgcagaaacttatccaacgccatccgtatctgtttgtcattggtacgcgctttatgtatggctttcgggtgattggcccgacgctgattggtgccagccagctgccgccgaaaatctttctgccgctgaatattctcggcgcatttgcctgggcgttgatttttaccactattggttacgctggtggtcaggtgattgcgccgtggttgcacaatctcgaccagcatttgaagcactgggtctggttgattctggtcgtggttctggtggtgggcgtgcgctggtggctgaaacgacgcgggaagaaaaagccggatcatcaggcgtaaaaccattgccctggataaggcgttcgcgccgcatccgacatccggagtaccatgcctgatacgacgcttgtgcgtcttttcatgccgaccaaaatattacccaatgaaatatccacgcacctcactgcgctattctgggttgaactgtggattcgccaacataaagccgccatccactatcaacgactgcccggtggtgtaatttgcgccctccgaacaaagccacaccaccaggctggcaatctcatgcgttgcgccaaaacgccgcaagggaatcgaaggctccgcgtcgggcttcacgtcgctgtcatccatgccattcattggcgtggcgatcgccccaggcgcgactgcgttcaccaaaatcttatgcctgaccagctccagcgccatcgctttggttaacccaccgagcgcatgtttagcggctgtgtaggcgctggcatccggcagcggcgtatgttcatgtaccgacgtaatgttgatgatgcgaccgccctgcccttgtttcaccatctgacgagccgcaatttgcgagcataagaatgcaccatcgacatcaacggtaaaaatcttgcgccactcatcaaaagccatatcaagaaacggcgctttggtcattgcacccgcattattcaccagcacatcaatgcgccccagccgttgaatgagtttctccagcgccagtgccccttctggtagattgccgagatccagctgcacgatctccgcacgtacgccgtggctaactacctcacgcgcggtatcttttgccccttcttcatctgagtgccaggtaataccaatatcaaacccctgctgcgccagtaataacgcgcactctttgccgatccccgaatcggaggcggtaataatcgcaacctgtgccatcgagttctccacttaacgctgaataaacgttaagtatagaaggcgcatatcatcagcgtttgtaacccccgcccaacgcaccagtgagttgaatggaggcatccagccactgcccttgcaataacaggccattggcccgctcacgcagcgcggggattctggcttcgctgacgcgggaaccagcaatgatgcccgcgttaaagcgcgcctgcgcaagacctaccacacgcaaggcatcgcgctcaatttgcgcctgatgctggtttttctccgccagtgtctgaacctgactggctgcccgcgccacgtcattcaccgcttcaaccaccgctttgttgtagctggcgatagacaagttgctttcggcttttgcgatatcgagattggcgttaagacgaccactatcgaaaatgggtagcgtcaggcctgccgtaacgcccatttgctgcgcggaatgacggaacagatcgcttaagtgcaacgcatcctgttgcaggaaggccatcaggttgatgtcaggataaaatgccgcttttgccgcatcaatggtgcttagcgatgactcaacgtaccagtgcgccgcctgcaaatctgcccgccgggccagtaaggagtaccccagttcatcaggaagctggcttgccactttcggcaacgcgaccggtttaagcttcaatgactttgtctggttatttgtaagtgcgcttaaccgtgcctcaataattttcattttccccgcgacatcgttgagctgctgccgggttttgctggcattaatatcggtttccacaccttcaactgaagaagtaatcccgttctgatatagctggcgatcggtcgcgataatggtgttctgctctttttctatttgctgcaagaccgtgtttaacgccgcctgggtttgccactcccagtacaggcgggctacgctgccagccagcaattggcgggtttgctcgcgttccgccgcccgtgctttaaccgtacccaggcgggcagtaacctccgcccgattctttccccagatatcgagatgccagcccgccgttaagccaaaagtaccgttggtgtaccacgggccggtcgtacctgcggccggatcgttcagagcaaacggccccattaagccttccgccgacattttttgccgctccatatccgccgaaaagtcgatctgcggaccatcctgagtggcaactgccttcgcctgggcttcagctagctgaatgcgctgttcagccacctgcatatccggtgcgttctgtagtgcattgttaattaaggaagtgagttgattatcgtgatactccagccaccattggctgtctggccaaccatttttcagcgccgtgggtaatgcggtgtcaacttgtgcagcgggcgtttgctggcttaacgcctggcgggtttcatgcataggcgcacacccggccagcatcagtaacagcggaaaacaggcgatggctggataaaaggaatcacgattcatgggggaataatcaggtaagaaaaggtgcgcggagattaccgtgtgttgcgatatattttttagtttcgcgtggcaatacatcagtggcaataaaacgacatatccagaaaaatatacactaagtgaatgatatcttccgatttatcttaatcgtttatggataacggcaaagggcttcgttttttcctatacttattcagcactcacaaataaaggaacgccaatgaaaattatactctgggctgtattgattattttcctgattgggctactggtggtgactggcgtatttaagatgatattttaaaattaattaatgtcatcaggtccgaaaataacgagaatatttcagtctctcatcctgttgcgctcctgtcatgtgcattgcttcatataatcactggcgcaaggagcgcgcagggggcggccaatcgccgccgccccctgcacccccgggctctggcgaacaaaatcgccgctgcgcggtgccctcggcttatcccttacggctaccgggtcgggcgcgaggtaacatccctgtaaaacgcgccctcagcccacatccatgtgggctgccccggccttcagggaacgcctcggcaattttgacgccaccaaacaaccgtgcggcctattgataaagagctaacacattgtcaaaaaacatcactatggttttttagagtttctcgatatcaattgcctgaatagcccttgcaatatcaggggaattattcaacacccgaacatgctgaaataattccgttgcttcatcgtattctttacgcaaataactcaaccactgtttaatccgcgcaacgtgatataacccggtatcgccctgcttttccagacgggtatatttttgcagcaaagcaaccacctccggccacggcattcgcggttcgttatattttaccacccggctcaggttgggaatattgagcgccccgcgaccaatcatcactgcgtcgcagccgctgatcgccatgcattgttgcgcgctctgccagtcccagatttcaccgttggcaatcaccggaatattcagccgctggcgaatatcgccaatcgcctgccagtcaatatgctccgcgcggtaaccctgctctttcgtccgcccatgcaccaccagctccgtagcgccagcctgttgaaccgcatcggcgatttcaaatttcttctcaccgctgtcccagcccagacgcactttcacgctgacgggcaaatgcgccggtacagcttcacgcatcgcttttgcaccctggtagatgagttcaggatctttgagtaacgtcgccccgccgccgctaccgttaaccgttttcgacgggcagccgcaattgagatccacgccccaggaacctaactccaccgcacgggcggcgttctctgccagccattgtgggaactgacctaacaactgcacgcgcaccagcgtaccagatggtgtccggctggcgttttgtagctcagggcaaatgcgatgaaagacttttaccggcagcagttgatccaccacgcggacaaactcggtgatgcacagatcgtagtcgttaacttcggtcagcaattcacgcaccagagagtcaagcactccctccatcggtgccagtaacacacgcatatcatcacccgcaaaaaaatgaggcgctatgttagcgcctatggtcagcggattaaaggtctgcaaagagggattgctgcaaactgcaatccctctctatgcttgatgtatgcctgagttcgctgcgcattgcgtaatgccggggagcgaaaaaataagcgctgatttcttaatgtgatcggtagcacgttttacgaattaattgtatgatgaatccatctcatctggggtgttgattatgagtaagacactgaacattatctggcaatatttacgcgctttcgtcctgatttatgcctgcctgtatgcaggcattttcattgcttccctgctaccggtaaccattccgggcagcatcatcgggatgctgatcctgtttgtcctgctggccttgcaaattcttccggcaaaatgggtcaatccggggtgctacgtactgattcgctatatggcgctattgtttgtgccgattggcgtaggcgtcatgcaatattttgatttgctccgcgcacagtttggcccggtagtggtttcctgtgcagtcagtacgctggtggtttttctggtggtgagctggagttcgcaactggtacacggtgaacgtaaagtcgtaggtcagaaaggatcagaagaatgatggcgaatatctggtggtcattaccgctgacattgattgtcttttttgccgcccgcaaactggcggcacggtataagtttcccttgcttaacccgttgctggtagcaatggtggtgatcattccttttttaatgctgactggcatctcttacgacagctactttaaaggtagcgaagtgctaaacgatctgctgcaaccggcggtcgtcgcgctggcctatcctttatatgagcagctacaccagatccgcgcgcgctggaaatcgatcatcaccatctgttttatcggcagcgtggttgcgatggtgacggggacttccgtggcattgttgatgggcgcttcaccggaaatcgccgcgtcaatcctgccgaaatcagtcaccacgcctattgcaatggcggttggcggcagtattggcggtattccggcaatcagcgcagtttgcgtgattttcgtcggcatcctcggcgcggtatttggccatacattgcttaatgcgatgcgtattcgtaccaaagctgcgcgcggtctggcaatggggactgcctcgcacgccctcggtacggcgcgctgcgccgagctggattatcaggaaggtgcatttagttcgctagcgctggtgttatgcgggataattacttcgctgatcgcaccgttccttttcccgattattctggcagtaatgggctaaaatttgcgatgcgtcgcgcatttttgatgtatgtttcacgcgttgcataattaatgagattcagatcacatataaagccacaacgggttcgtaaactgttatcccattacatgattatgaggcaacgccatgcatccacgttttcaaaccgcttttgcccaacttgcggataacttgcaatctgcactggaacctattctggcagacaagtacttccccgctttgttgaccggggagcaagtctcatcgctgaagagcgcaacggggctggacgaagacgcgctggcattcgcactacttccgctggcggcggcctgtgcgcgtacgccattgtcgaattttaatgttggcgcaattgcgcgcggtgtgagcggaacctggtatttcggtgccaatatggaatttattggtgcgacaatgcagcaaaccgttcatgccgaacaaagcgcgatcagccacgcctggttgagtggtgaaaaagcgcttgcagccatcaccgttaactacacgccttgtggtcactgccgtcagtttatgaatgaactgaacagcggtctggatctgcgtattcatctgccgggccgcgaggcacacgcgctgcgtgactatctgccagatgcctttgggccgaaagatctggagattaaaacgctgctgatggacgaacaggatcacggctatgcgctgacgggtgatgcgctttctcaggcagcgattgcggcggcaaaccgttcgcacatgccttacagtaagtcgccaagcggtgtcgcgctggaatgtaaagacggtcgtattttcagtggcagctacgctgaaaacgccgcattcaacccgactctgccaccgttgcagggagcgttaattctgttgaatctcaagggttatgattacccggatatccagcgcgcggttctggcagaaaaagccgatgcgccgttgattcagtgggatgccacctccgcaacgctgaaagctctcggctgtcacagtatcgaccgagtgcttctcgcttaagcctggtgccggatgcggcgtgaacgccttgtccggcttgccagccctctcctggtgtcgaaattcccggcaaacagtttgccgtttcttgcgcaaaaccagcgggtaaagtagcctgatggaaattttccttagatcgagtctcctgcatgttaaagcgcgtgttcctcagcctgttagtcctgatcggcttgctgctgttgactgtgctcggcctcgatcgctggatgagctggaaaaccgcgccttatatctacgacgaattgcaggatctcccctaccgccaggtcggtgtggtgctcggaacagcaaaatattatcgtactggcgtaattaatcagtattatcgctaccgcattcaaggagcgattaatgcctataacagcggtaaggtaaattatctattactgagcggcgataacgcattgcaaagttataatgagccgatgaccatgcgcaaagatttaatcgctgctggtgtcgacccatcagatattgttctcgattacgcaggctttcgtacgctggattccatcgtgcgtacacgcaaagttttcgatactaatgatttcattattatcacccaacgtttccactgtgagcgagcattatttattgcgctgcatatggggattcaggctcagtgttatgccgtaccgtcaccgaaagatatgctgtcagtacgtattcgtgaatttgccgcccgtttcggtgcgctggctgacctttatatttttaaacgtgaaccgcgttttttagggccgctggtccctattccggctatgcaccaggtaccggaagatgcgcaggggtatcccgccgtcacacccgaacagttacttgaattacaaaagaaacaaggaaagtagttatggatgtacagcagttttttgtcgttgccgtttttttccttatcccgatattttgtttccgcgaagcatggaaaggctggcgcgcaggcgcgattgataaacgggttaaaaatgcaccggaaccggtgtatgtctggcgagcaaaaaatcccggactctttttcgcttatatggtggcatatatcggcttcggaattttatctatcggcatgattgtttatcttattttctatcgttaatattcccctctccagttaattattgagaataattattacttcacctgataagctgcggatatcacattcctaaccgcagctatttgtgaatcttttcacagtttaaattcccccgcacgcttagccttaatatcagtacattattatttactaaacgctcgccttaattacctatagcattaaggaagatcacatgccgcaacaaaattatctggatgaactcactccggcttttacgtctttactggcgattaaagaagcctctcgctgtttattatgtcacgacgctccctgtagtcaggcttgcccggcacagaccgatccggggaaatttattcgctcaatctactttcgtaattttaaaggcgctgccgagacaattcgcgaaaataatgccctcggtgccgtttgtgccagagtgtgcccgacggagaaattatgccaaagcggttgtacccgtgccggtgttgatgctcccattgatatcggccgcttacagcgttttgttactgattttgaacaacaaaccggaatggaaatttatcagcccggtactaaaacgctcggcaaagtcgcgattattggcgcaggtcctgccggattgcaggccagtgtgacactgacaaaccagggttatgacgtcacgatttatgagaaagaagcgcaccccggtggctggttgcgtaacggtattccgcaattccggttaccgcaatcagtgctggatgcagagatcgcccgtattgaaaaaatgggcgtgaccattaagtgcaacaacgaagtcggtaacacactcacccttgagcagctgaaagcagaaaaccgcgcggtactggtcaccgtggggttatcaagcggttccgggctaccgctgtttgagcatagtgacgttgagattgccgtcgacttcttgcaacgtgcacgacaggcgcaaggcgatatcagcattccacaaagcgcattaattatcggcggcggtgatgtcgcgatggacgtagccagcacgctgaaagttctcggctgtcaggcggtaacttgcgtagcgcgtgaagagttagatgagtttccggcaagcgaaaaagagtttaccagcgcccgggagctgggcgtttcgatcatcgatggattcacgccagtagccgtggaaggcaataaagtcacgtttaagcatgtacggttatcgggcgaactgacgatggcggcagataaaattattctcgccgtcggtcagcatgccagactagatgcctttgcggagttagagccgcagcgtaacaccatcaaaacacaaaattaccagacccgcgacccgcaagtctttgctgcaggcgatattgttgagggtgacaaaaccgtggtctatgccgtgaaaaccgggaaagaagccgccgaggcgattcatcactatttagagggagcttgctcatgttaacgaaagatctttcgattactttttgcggcgtgaagtttcccaacccgttctgcctctcttcttcgccggtaggcaactgctatgagatgtgtgccaaagcctacgacacaggttggggcggtgtggtgtttaaaacgatcggcttttttatcgccaacgaagtctcgccgcgttttgatcatctggtgaaagaagataccggttttatcggcttcaaaaatatggagcagattgctgaacatccgttggaagagaatctggccgccctgcgtcggctgaaggaagattacccggacaaagtattgatcgcttcgatcatgggggaaaatgagcagcaatgggaggagctggcgcgcctggtgcaagaagctggcgcggatatgatcgagtgtaacttctcctgtccgcaaatgacttctcatgcgatgggtagcgatgtcgggcaaagcccggagctggtagaaaaatattgtcgggcagtgaaacggggttccacgctgccaatgctggcgaagatgacgccgaatatcggtgatatgtgcgaagtggcgctggcggcgaagcgcggcggcgcagatggcattgcggcgattaacaccgttaaatccatcaccaatatcgatcttaatcagaaaatcggtatgccgatcgttaacggaaaatcgagtatttccggatattccggtaaagcggtaaaaccgatcgccctgcgcttcattcagcaaatgcgcacccatccagaactgcgcgatttcccaatcagcggtatcggcggcattgaaacctgggaggatgcggctgagtttttattgctcggcgcagcaacgttacaggtgaccaccggcatcatgcagtacgggtatcggatagtggaagatatggcaagcgggttgtcgcattatctcgccgatcagggatttgattcgctgcaggagatggtaggtctggcgaataacaatattgtcccggcggaagatttagaccgcagttatattgtctatccccgtatcaatcttgataaatgtgttggctgtggacgctgttatatttcctgttacgacggcggtcaccaggcgatggaatggagcgagaaaacccgcacaccgcattgtaataccgagaaatgtgtgggttgtctgctttgtggtcacgtctgcccggtgggttgtattgagctcggggaagtgaagtttaagaaaggcgagaaagaacacccggtaacgttgtaaaaccagagacgcatccggcatttggttcctgtcgccggatgcggcttgaacgccttatccggcctacaaaaccatacaaatcagtatgttgagcttattgtaggccggataaaacgcgccagcgttgcatccggcatttggctcctgttgccggatgcggcgtgaacgccttatccggcctacaaaaccacacagatcatgatgttatgtgcgtttatgaccgaatgcggaccacattcacatcatttcttacgcgcgtatttcagtgaatccagcgctacggcgaagataataatcgcccctttgatgatgtactgccagtatgggtttacgccgatatacgtcaggccatagttgatgacggtaaaaataattaccccggtcaccacgccaatcaccgtccccacaccgccgctgaacgatacaccgcctaccacgcacgccgcgatagcatccagctcatacataaagccgaggttgttggtggcagagccgatacgtccggcttctaacatcccgccaaaggcatagaacacgccagacaacgcgtagatcatcagcaggttcaggccgacgttgacaccagatacttttgccgcttccgggttaccgccaatggcaaaaatgttcttaccgaagcgggttttgttccacaacacccagacgaacgccaccgcaatcaacgcgtagaaggtgatgtaagagagacggaaactccccagcgcgacaaagccctgagcaaaggtagagaagccactgtcaaaaccagaaattggcgacgccccgacaaagtcgtaatagagcgagttgatgccatagacgatgatcatcgtgccgagcgtggtaatgaacggcgtcacgttgagataagcgataatcagaccgttgatcaaaccgatcaccgcaccaatggcacagacaatcagaataaccagcgcaatcggcatcgtcgccatttccgggaacactttgttggcgttatccatggactgcaataatgtcgcagccaccactgccgccagccctacctgacgaccagcagaaagatcggtcccctgggtgacaattaaccctgccacaccgagcgcgataataatacgcaccgatgactgggtgagaatattacttaagttcaacagacttaaaaatgttgggtcctggaaaataataatcgccagcaaaactaaaagaacgacgtaaataccgccctctttcaggtaagtaagaaaacttttcttatttaacgcactcatgggaagcccctaatcttaaaggtgcaaagacgcaagacgcagaatttcgttttgcgttgttgtttttgtatcgacaattccggaaacgagaccattgctcatgaccagaatacggtctgttatccctaacaactcaggcatttcagaggagataataataatccccttgcctttcttcgccagttcggcaattaactgataaatttcaaacttcgccccgacatcaataccgcgcgtcggttcatcgagcattaatatttctggttgcgttagtagccagcgaccaataatcaccttttgctgattaccaccggagagcgaaccaatttgcgtccgatgacccggcgtttttacccgcatcgaatcaatcacccactgggtatcgcttttcatccgcgagttatccagtaaaccaactttatttttgtagttgcgaatattggaaattaacgagttaaaaccaatatccagataggcataaattcccgttgagcggcgctcctcagttaccagtgcaaatccatggtttatggcttcgttggcattatggttattgatctgtttgccgtgcaacgttatggtgccagccgatttctcgcgaataccaaataacgtctcaacaatatcggtacgtttcgcccccaccagaccggcaataccgaggatctcccctttatgcagatcaaacgagacatcgcgaatcgacggctggcgcagtgacttcaggttacgtacctcgaggatgacttcgcccggtttgttttctttgtcagggaaacgctggttaagagaacgcccaaccatcatggcgatgatcttgtccatcgtcagtcctgccagcggttcggtggcgatccactgaccgtcgcgcaatacggtaacttcatcacataactggaagatttcttccattttatgcgagatataaacaataccgcagccgcgctcttttaatttacgaataatagtgaacagatgattgacctctttttcggttaacgaagaagtcggttcatccataatcacaattttcgcgttataggaaaacgctttggcgatttcgatcatctgcatttgcgaaacggataatgtgccgacgcgcgcacgcggatcgatatcaatatccagttcgtcaaaaatcgctttggtttcgcggtacattttgtcctgatcgacaaacatgcctttggtgggatatcgccccagccacatgttatccatcaccgaacgttgtaataccaggtttaactcctggtgtaccatcgaaataccattttccagggcttcttttgcagaatggaaatcgatctctttaccctggaataaaatggtgccggagtctttttgataaataccaaacaggcattttaataatgtcgattttcctgcaccgttttcccccattaatgcatggatagaatgtggccggacttttaaattaacgttatcaagtgccttaacaccaggaaaggacttgttgataccgctcatttccaacaagtattccccggaggacggagtcgttgagctgaccatataattttaccttgttggccatacaataagggcgcagtaatagactgcgcccaatcagtcttatttcttgctgaattcagccaggttgtctttatctacgccaacataaggtacgcggaccactttgttgtcgattttccagttggtgccatcagccgcacctttaccatcggccaggtttttcgccagatcaaaggtcgctttcgcctggttgttagcatcgttcagtacggtgcccgccagtgcaccggatttcaccagcgccagcgcttctggcagcgcatcgacgccaaacaccggaatgctggacttgttgtgtgctttcagcgcttcaaccgcgcccattgccatcgcatcgttgttggcgataaccacttcgattttgttggcgttcgggccagacagccaggcgtccatcttatctttcgcctgagcggtgtcccacattgcggtatctaactgtaactgttcagttttgatgcctttatcgttcaattctttaatcacgtaagtggtacgtgcttctgcatccggatggcccggttcacctttcagcagtacgaactgaatctgaccgtctttgttcagatcccaaccctgattcgccgcccagtgtttagcaatcaaatcgccttgaataatgccggactctttggagtcagtgccaacgtagtaggctttgtcgtagctatccagcgccttacgagacggttctttgttgaagaaaaccaccggcacgttttgcccacgcgctttctcaatcaccgtacccgcagctgccgggtcaaccaggttgattgccagtgccttcacccctttcgccagcaatacgtcgatctgatcgttctgcttggactggtcattctgagaatcattcatcagcagctgaacatctggcgcggctttcgcatcttgctcaatagccttgcgcactacagacataaagttatcgtcgtacttatagattgttacaccaatgcgagtatcagcagcgtgtgcagcggcaccgaataacatgctggccatcacagcagacagggttaacaccttcttattcatggtatctccggtttttcttatgcagggtagtgcttgagataaatgctcggcggggcagtagagttaatgaagtgttactgaacgccgaagctcactttttaaaattcgttcttccatgcccggtaacgctccagaaaacggctttaattgttgttatgacgctgttacctcggcaaaagtgattattcactgttacatacgggttacaacgttaaaacggtgcaatcatagctatcacattgttaagatactgtgaaatcactcacagattgaaagcggttacatcgcctgatttgttgagttagtgatcgccgccgcattctggcgtgttgcgacagaatggcgacgcactaacgtcggcataaaacagtggctggcacgaggatcaatattgcctgctgccccctgcaaggccagttcggtggctaatttcgccattgaagcaatgggataacgcacggtcgttaattgcgggtcggtgtaacgggcgatgggaatatcatcgaaaccgatgattgagagatgtaacggaatcgcaatgccattatcttttaatgctgtcagtgcgccagcggccatattgtcgttataagcaaatacagcggtaagttgtagattgcgccccagcagttcaaccatcgccgcctcaccgcccggcatgtccggcgtaccagcgccaatccagctttccggcggaataatatcctgctctttcaacgcactcatccagcctgctttacgcatggcgtcatcttcaatgccgtggctggaagaaagataaccaatacgttgatgaccgttattcagcaacatgcgcgtcgccattcgggcaccgctgagattatccaggcaaacgcaacgatgggcgtaccccggcacaacgcggttgattaacaccataccgggaatgttatccataaattgcgccagttcatcgtcactcaatgcttttgagtgaacaatcaacgcattacaacgctggcgaattaacacctcaatggcgtgacgctctttttccgcttcatgatagctattgccgattagcacgtatttctgatgctgctgagcgaccagatccaccgcttttaccagcgcgccgaaaaacgcatcagaaacgtccatcaccaccacgccaatggtgtcgctaacctgagttgccagcgcctgggcattggcgtttggccgataatccagctcactcacggctttcattactgcttcacgcgtgtcggcactgaccagcgtgctgttattgagcacccgggaaaccgttgccacagagacgccagcctgacgcgctacatcacgaatggtgatcatattcactacctgttatgagattgcagtaaatgactgcttgctggcggctattttgtcagcactgaatacaggacttcgtgaatcgagtcacagcaatggaaactgttacagccgttttgttaacgaatgtgatccagatcgttatcttgatgttttagatattgccggtccggcagcacgcaaagttaactgacgccagagccattccaccggcccctggcggaagtaacgcagccagataacagagaagaggatattcgccagccataccggaataacaaacgccagcagctccaggcggtcaaaatgcataaacaaaccgaggtggtaaaaaagcgtggtacaaatcagcgtttgcaatagatagttggtcagcgccatccgtccgacgcaggcgatcgcaagcaccagcttaaagcggctcaattgcggccagaagccataaaacagcgacgcatagccaatcgcctgaaacggcgcactcagttcccgcggcatttgaagtaagaaggcacaccagcgatacgcccagtccagctgccattgcagggcgatggcaggaaggttaatggtcaccccaatcgccaccagcacaaaaccagtacgacgatagtgacgtaagctgaactgccctttcagccagccgctgcgcatcagcgccgcaccaatgagcatcatccctgccagttgccagccatactgtgcgcccagtgccagtaaactgttgccaacaccatcggcacgattactgatcgcttcaacgccgccgtgaagcttccagtatttttcatacaaaatagccgatgcatccggcgtccaggcgcggctggtctggctgtcggaaatcagccccaataacagcaaaacgccaagccccaccagataaagcatgacgcctgtattaaacaggctttttaccgatggcgcatcgcgcaccagccgccagcagattaagcccaccagcccgtaagccagcaaaatatcgccgtcccagaacaataaaccgtgaataaagcccaacaagactaacagcgttaaccgcgactggatccagcgtctgccacggggcagcaacatttgcaggcccgcaccaaacagtagcgcaaaaagcgtgaggaatttcacctggccgatgagatcaagaaatgcccaagtccatgcatcccgcggcgtaatagcaccgtaccaggcgggattgagataagccgcctttggtagcccaaaggcgctgatgtttaatagcaggatccccagaatggcgacgccgcgaacaaaatcgagcgtgacgttgcgctccatggttcctgccttttaatcagttgtgatgacgcacagcgcgcagaaactcgtggcgcgtattctgactggatttgaacaatccaccaagagaggtcgttgtcgtggcactggttgcatcgcggatgccacgcgccttcacgcagtaatgcaccgcgtcgatcgagacagccacgttattggtgcccagcagcgtttgtagcgcaataagaatttgctgcgtcagacgttcctgcacctgcggacgctgggcaaagaactgcacaatgcggttaatttttgacagaccgatcaccgaatctttcgggatataggccaccgtcgctttgccatcgatggtaacaaaatggtgttcacaggtgctggtcagagtgatatcgcgcacggtgaccatttcatcgaccttcattttgttttcaatgagggtgattttcgggaaattggcgtaatccagaccggagaaaatttcatcgacatacattttagcgatgcgatgcggcgtttccatcaaactgtcatcagccaggtcgagattcagcagctgcatgatttcggtcatatgaccagcaataaggcttttgcgcgtttcgttatccatttcatgcacgggcgggcgcagcggtgtttccagtcctcgcgcaactaacgcttcatgaaccagggccgcttctttactgagtgatggcatttatgatttctcctgcaggtgtgacgcctccgccctgcgtgggggcaaagttattaagctgatttacagcctgattattgtgcgtgaggcggcgcacataatccagtattcacagcgataattattgtaattgccgctgcctttcatcagcagatgttaaaacatcgttatgcaaatacggaagtgaaagttactcacagcacattgaataaacggtatgatgaagaaattgcaaacaacacaacaaggagccacgcatggaaatgctcgaagagcaccgctgttttgaaggctggcagcaacgctggcgacacgactccagtaccttaaactgcccgatgacgttcagtatctttctccctccacctcgtgatcacactccgccaccagtgctgtactggctttccggattaacctgcaatgacgagaacttcaccaccaaggcgggtgcccagcgggtagcggcggaactggggattgtactggtgatgccagacaccagcccgcgcggcgaaaaggttgccaacgacgatggctacgatttaggccagggcgcaggcttttatcttaatgccacgcaaccgccgtgggcgacgcattaccggatgtatgattatctgcgcgatgaattaccggcgctggttcagtcgcaatttaatgtcagcgaccgctgcgccattagcggtcactcaatgggtggtcacggtgcgctgattatggcgctgaaaaatccgggtaaatacaccagcgtttcggcctttgcgccaattgtgaatccgtgcagcgtcccgtggggaatcaaagcgtttagcagctatttaggtgaggacaaaaatgcatggctggaatgggacagttgcgcactgatgtatgccagtaacgcgcaggatgcgatcccgacgcttatcgatcagggcgataatgatcagtttcttgccgaccagttgcaacctgcggtactggcagaagccgcgcgccagaaagcgtggccgatgacgctgcgtattcagccgggatatgatcacagttactacttcatcgcctcttttatagaggatcacctgcgcttccatgcgcagtatttactgaagtgaaagtccgcccggttcgccgggcatcttctcatcagaagcgataatccactgccataaagtaacgacgtccgtcttcgttatagctgtagtcgtcacgactgagatccttgtcgccaaggttcagcacgcctgcgcgcagtttgacgtctttagtcacctgccaggccgcgccggtattccagatggtataaccgcccggtgttttagccgtcgcgctgtcggcgcgtttctgcccggtatagtgcccagaaacatagaatgaccagtcttccagcgccagcggtttccagtccagcgtaccgttagcagtatggaacggcagatcggatagcggtttgttttcgccgttgctgacaccacgaccatcgttgtaggtgtagttgatcgacagtttccattcatcgttgaacggaattttcagttcggtttccacgccctgaatacgagctttgttaacgttgtagtagctaaataccggtatgcgccgtccgttagcgcccgtctcaaaaccaacaaagttttggtagcccggtgcagcgttgacgtcagacgtacggctgatgctgatacgatctttcacatcgttacggaaaacggtaacgctggattcaaccccttccagccagccttcttcacccatgtagtaaagccccagctcccaactttcgctggtttctggtttcagatccgggctacccacaatcttacatgcgccacggcaggaattgctcgtccagtcagggctaagttgcaacagagaaggtgctttaaatgccgtcgcccagccccctttcaccgttacggtgtcggtggcgttataaaccaggtaggcacgcggactccagtgttcaccgtaggtttcatgatcgtccatacgtacgccggtcgtcagcgccagcggctcgaagatccgccattcatcttccacaaacagcgcgtactggctggcagacgttttggagctggttcccccggtcaggttcaccgcatcgctaagtttgtcgtgacgccattcaccgccaaccgtgagaaactgattaatcgccgtcagcggcaacgtgtatttgccgtcgaccgtattgctttcggaagttatcgggctgctgttgccagggtttttgttctcgactttctcaccgtagtatttcagttcgctggtgccgtaatcccaacgcccattatggctgacggagtagttctggcgttccaggcggtttttgtccagcgagtcggaatcacgatcctgacggtcgaaaccgtatccggcagtaaaatcgtgattttgattcggtgtccaggcaaattcgacattgccgtcgcggctggagaatccttcaatacgcggcgtttctccggtatcggtggtcgttgagttttgcgggtcatccttttcacgttttgccaggctgccgtaagctttcattcccagcacgccgtcaattaatggtccgctggtaaagaactgaccgttataggtatcaccgcgatcgcgatgttcctgaacggtggtatcgacggtaacggtgcccgaccatttctgaccgatttttttggtgatgatattcactacaccgccgagcgcatcggaaccgtacagcgacgacatcgggccacggaccacttcaatacgttcgatggaatcgaccgggatccagttcagatcgaaatcattgtggcggaagacggcattgcgggagttaacgcgtttaccgtcgacaagaatcagggtgtagctgctgtccagaccacgaatactaacgcccttacggttatccccttcgttcgtcagttgtacgccaggcacttctttgaggacatccttcagattctgtaccggttttcgctgcaggtcttcctgggtaatgacgctgatactggcgggtgcatctttaaggttttgttcaacggaagatgcagtgacaaccatcgtttcgccatcatcatcgaccgctaacacaggccatgcacaagaaatagcggacaaacacagcccgacccgtacgaaagggttcaacctaaacattccatatctccatgaggtaactacgaaaataaaatgggttatcgctcacatcttcttcacgtccccttgcgtacggcagcatcgcggtggacttatttgtatgcaggtgatcatcccagaaagccggaccagcctctgatttgtcagccttttttgattgcggcgtaacgataatgcaaacgataacaattatcaatccaaatgttaaattttatatccgcatgatttgtcagggaaatggaattgaaaaagccctctcggttgagagggcttagcaaggaagggaggaaacttatttcttatcgttctgcgggaacttcatttcgctgtagcgtacgaagtgagttcctttaatcagcttgtagccgaaccaaataatcaggaacagcgggataccaatatacgttgccgctacgccgccccagtcaatagtatctttcaggaacgcttcgtagttctggcccaaagtgataatcagacacagaatgaatgcgaagatcggccccaatgggaagaaacctgaacggtacggcagatcgttaatgtcgtgtccctgcaatacgtaaccgcgacggaagcgatagtggctaatggcaatccccagccaggcgataaaacccgtcatcccggaggtattcagcagccacaggtataccgtctggttgccaaacatggaggtcaggaagcacagaccggcaatcaccgtcgtcgcatacagcgcattacgcggcacgccaccacgcgacagtttagcgaaaatgcgcggcgctttaccgtcacacgccagggtgtacagcatacgagtagacgcatacataccggagttaccggctgacagcaccgccgtcagaataactgcgttcatcaccgccgccgcagagagcagacccgcgtgctggaacaccagggtgaacggactaacgctgatgtctttaacatcgttacgcagcaggctcggatcggtgtacggaataatgaggctgataatcaggatcgcgaacacatagaacaacaggattcgccagaacacctgacgtaccgcgcgtggaatgtttttcgccggatcttcggactcgcctgcagcaataccgatcagctcggttccctggaaagagaagccgacaatcatagctacgccgatcatcgccgcaaaaccaccagcaaacggcgcttcgccgattgtccagttgctccagcccgcaggctgcgcgcctttgaagataccgataatcatcagcacgccaacgatgataaagacaataactgtcgtgactttgatcagtgagaaccagtattccgcttcaccaaagccacgaactgagatgtagttcagcaggaagataacgccgaggaacaacgcactccagatccagcccggtgtatccgggaaccaccagctcatgaccagctgagctgcaaccaggtcaacggcgatagtcaccgcccagttgtaccagtagttccagcccagcgcgaagccaaagccttcttcaacatagttctgaccgtaagtggcaaacgaaccggaaaccggcatatatgcagccagttcaccgagactggtcatcaggaagtaaaccatcaggccaatcaacatatacgagagcaatgccccgcccggacctgcctgagaaatcgttgcgccagaggcaacaaaaagacctgtaccgatggaaccgccaatggcaatcatcgtcaggtgacgcgcctttaattcacggcgtaagcccggcgcttctgtggttttagtttcggaaaccatacaaaaatgctatccatctaaaaaatgaggcgcgattgtagcagacgattggcaatccttccggcagaaatacacggttataagacaccttcatgatcgcccagggattataagtaaagcagccaatctcttttctggcgaatgcatgctgaaggcgctgcgtcacgaaatcgacacagcaccagcatgttcttgtacagcaacttaacgcggtacattcgcgggatcgcaatagtccagaaagcgccgtagcgcgttggaaaggtgtttttgccgatgatgtatacgccacaacgtacgcatcaggcgcggcagagggaccgcaacttcacttaatgtgcctgcctgcaattgatcttcaatcacccgtcgcgacaggcaactaattcccaacccatgacgcaccgcatgtttgattgcctcggagttacctaattccatcgccatctcaaacttcggtaaatgtgacagcaatagataatcgacaatctcccgcgtgccggaaccgcgttcacgcaggatccacggcgcagcggccagctgctctaaggtgaccggaccacgggccaacggcgaagtcggcgcggcgaaaaccaccagctcgtcttccagccacggttcagaaatgatttcagtgctgtggcacggtccttcaataaagccaatatcaacgcggaaatccagcaccgcttgcatcacgtcctggctgttcccaacgctaagttcaatcggcaactgcggataatcatggcgataacgggcaataactgcaggcagaatgtagttaccgatggtactactggcatagatacgaatcgcgccgttgtcttcgcgaaacagttgttcgatttcaaccgcctgttcaagcagtgccaacgcacgcggatagagcagccgaccgtgttcattaactaccagtcttttccccacgcgatcaaacagttgcacgccaagctgcccttccaggtcggtcaaggctgcgctcactgctgattgcgacaacgccagcatcaccgacgcctgggtggttgatccacttttcaatacttctgcaaaaacttccaactgccggagggtgatgtgcatagtcgcttaccacttataaagattaattataaatatataatcaattttatttttaaaccagttagtcgtaaccttatgcccggataaaggagagggttatgacgaatatcaccttacagaaacaacatcgtacactgtggcattttattccggggttagccctgagtgcagttatcaccggggtcgccctgtggggtggttccattcccgcggttgcgggtgccgggtttagtgccctcaccctcgcaatcttgttggggatggttttaggcaacaccatctatccgcacatctggaaaagctgtgacggtggtgtgctgtttgccaagcaatatttattacgtctgggtatcattctttatggcttccgtctgacgttctcgcaaattgccgatgtcggtatcagtgggatcatcattgacgtgttgacgctgtccagtaccttcctgctggcttgcttcctggggcagaaagtgtttggtctggataagcacaccagctggttgatcggtgccggtagcagtatctgtggtgctgccgcggtactggcgactgagccggtagtgaaagcggaagccagtaaagtaaccgtggctgttgcaaccgttgttatcttcgggaccgtcgcgattttcctctacccggcgatatatccgctgatgtctcaatggtttagtccggaaactttcggtatctacattggttctactgtgcacgaagtggcgcaggtggtggcggcaggtcatgccatcagcccggatgctgaaaacgcagcagttatttccaaaatgctgcgcgtgatgatgctggctccgttcctcatcctgctggcggcgcgtgttaaacagctgtctggggcgaacagcggcgagaaaagcaaaatcactattccgtggtttgccatcttgttcatcgtagttgccatctttaactcgttccacctgttaccgcagagcgtggtgaacatgctggtaacgctggataccttcctgctggcaatggcgatggcggcgctgggtctgaccactcacgtcagcgcgctgaaaaaagccggggcgaaacctctgctgatggcactggtactgtttgcctggctgattgttggtggtggtgcgattaactatgtgattcaaagcgtcatcgcataaaccactacatcttgctcctgttaacccgctatcattaccgttttcctccagcgggtttaacaggagtcctcgcatgaaatacattggagcgcacgttagtgctgctggcggtctggcaaatgccgcaattcgcgccgccgaaatcgacgcaaccgcgtttgccttgttcaccaaaaaccaacgtcagtggcgtgccgcaccgctcacgacgcaaaccatcgatgaattcaaagccgcctgtgaaaaatatcactacacatcggcgcaaattcttccccacgacagctatctgattaacctcggacatccggtcactgaagctctggaaaaatcgcgcgatgcctttatagatgaaatgcagcgttgcgaacaactggggctttctttgctcaacttccaccctggcagccatctgatgcagatttcagaagaggattgccttgcgcgtattgccgaatccatcaacattgcgctggataaaactcaaggtgtgaccgcggtgattgaaaacaccgccggtcaaggcagtaacttagggtttaaattcgaacatctcgcggcgattatcgacggcgtggaagataaatcccgtgtcggcgtctgcattgatacctgccatgctttcgctgccgggtatgatttgcgtactcctgccgaatgcaagaaaacgttcgcggattttgcccgtattgtcggctttaagtatctgcgcgggatgcaccttaacgatgcgaaaagcacctttggcagccgcgttgaccgccatcatagcctcggtgaaggcaatatcggtcatgatgcgttccgctggatcatgcaggacgaccgcttcgacggcattccgctgatccttgaaaccatcaacccggatatctgggcagaagagatcgcctggctgaaagcgcaacaaactgaaaaagcggtagcctgaagatgaataaccgggaaaaggagatccttgcaattttacggcgtaacccgctgattcagcagaacgaaattgcggacatgctgcaaatcagtcgttcgcgcgttgcggcgcatattatggatttaatgcgcaaaggccggattaaaggcaaaggttacattctcaccgagcaggaatactgcgtagtggtggggacaatcaatatggatattcgcgggatggcggatatccattacccgcaagcggcttctcatcccggtacaattcattgctcggcaggcggcgttggacgcaatatcgcccacaatctggcgctgttaggccgcgatgtccatttgctttcagtgattggcgatgacttttatggcgaaatgctcctggaagaaacgcgccgtgccggcgtgaatgtctccggctgcgttcgtttgcatggtcaaagcacatcgacgtatctggcaattgccaatcgagacgatcaaaccgtgctggcgattaacgatacccatctgctggaacagttgacaccgcaactactgaacgggtcgcgcgatttacttcgtcatgcgggcgtggtactggctgattgcaacctgacagccgaggcgctggaatgggtctttaccctcgctggtgagatcccggtgtttgtcgataccgtttcagaattcaaagcgggcaaaatcaaacactggctggcgcatattcacaccctgaaacccactttaccggagctggaaattttatggggacaggcgatcaccagcgatgctgaccgtaatgccgcagtgaatgcgttgcatcagcaaggtgttcagcatctgtttgtttatttgcccgatgagtcagtttattgcagcgaaaaggatggagaacaatttttgctgactgcaccagcgcatacgacggtagacagttttggtgctgacgatggttttatggcgggtctggtatatagctttctggagggaaacaatttccgtgacagcgcccgttttgcgatggcctgcgcggcaatttcacgcgccagcggcagcttaaacaaccctaccctgtctgccgataacgcgctttcattagtgccaatggtgtaacaatgttgccggatgcgacgcttaacgcgtcttatccggcctacaaatcaggcaatttcagcaagtaaatgtaggcctgataagcttgcgcatcaggcaatgacactcaagctaaaccaataaagaacccggcaatggtcgcactcatcaagttggaaagcgtcgccgccgccagcgcccgtaaaccaagctgggcgatttccggcgcacggtgtggcgcaaccgcagaaaacgcccccaccaccaccccgatagaaccaaagttagcgaaaccgcacaacgcgaaggaaataatcgccacagttttagcatcgagagtgccagccgtttgcagatagggtgagaaattgagataagcgacaaattcatttattgccagtttctgtccaatcaaactcccggcaagattcgcatcactccagtccacacccatcacccacgccagtggagccagcaggtaacctaaaatggactccagcgaggcatgttcaaaaccaaaccagccaccaacgccgccgataataccgttaatcaacgcaattattgcaacaaatgccatcaccactgttgccacacctgcggcgattttcagcccggtcattgcccctgtcgcagcggcttcaataatgctttttggcggtgtttcggtgaaagagaggttattaaaggaaacctgcgaagattccgttgccgggcttaacaggcgggcaaacaagatcccgccagggatcgccattaatgatgccgccagcagatattccacaggcacgcccagtgcggcgtaaccaatcattgtcgaaccagcaatcgaggccatgccactacaaatcgctgtaaataattcattgcgattcagacgatcgataaagggtttgacgattgccggaatttcgttttgcccgaggaaaatggtggtgaccgcgacgaatgactcgatcttgctgatatttaatgctttctggaagataccgccgagaattcgaattaaaatccccatcacaccgatgtagtagagaatactcaccagcgcggtgacgaagataattgccggtaacaccctgaaaccaaagataaatcctgcaccatcaaataaggtatccattttcggtccgaccagagaaccgaagataaatgcgctacccgcgtcgctgtacgccatcactttatgcacgccaaaagcgactttttcagcgacccaacgccctggcggtaaccaaagcataatgccgccaatcacgacctgtaacactaacgccgcgccaacggtacgcaggctgatcttcttcttgtttactgacagtaaaaacgcaatcgtcagcaataccaccattcccagaacacttctcatgacatccatagtgattatctcttcatgtcatattgggcgacggctttctgcccatcagaaatagccaggcctgcatcttgcgataccggcccggcttgttatcaacacttaatgggttttgatgtagccgcgcacgcactcttcgactaatccccagaaccagtctgtatcaatagtgatgccgactttggtattggcgggcttgccaagaacgcccagctcgtcgcagacggtacgcccatagcaagggccactgttgacgtccacttcgacgtacatctcctgggttttaatgccatcagggttaatcagataaccgatgcaggtggcgtcgtgcaccgggccgccagcaaggccgtagttttcgaactgcgttttgagagtgaagttcatgatgtcgctgaacagctctccggcggggccgcctgccctttccatccgagcaatcacgtccggggtgcaaacggtctggttggtgagatcgaggcccatcatcactaatggaacgccggaggtgaacactacgcgtgcggcttccgggtcggcaaagatgttgaactcggcagatggcgtgaagttgcctgtaccgtaagcgccgcccattagcacaatttcacggattttgggcaggatcgcgggttgcatacgcattgccaccgcgatatttgaaagcggaccaaccggcaccagagtgatatcgccatcgcttgccatcagggtatcaatgatatatttcaccgcatgagtgctttctgcctggcgggtcagcggctcgaataccgggccatccagtccggtttcaccgtgaatattatcggcaacgatttgttgacgcataatgggctgcggcatccccgcataaaccggaacattaatctccagtttctggcaaacattcaggccattaattaatgttttatcaaacgtctgattacccgctacaatagtgatgcctaataaatctattgccggatgtttcgccgccatcattatagcaatagcatcatcatgacccggatcacaatccagaataatttttctcttttccattgtttatttcctctgtttccagttgcgttattttttctacagcaaagaaaattcgaccgggccgatgattgaatcttaacaacagcgtacgtatgctaaatatgagaaatctcatagcggataaacatcgtgaaagaaatccacaataatgatcttaagcagcaattgatgagtgaatccgcgtttaaggattgctttttaacggatgtttcagccgatacgcggctgtttcattttttagcgcgtgactacattgtgcaggaagggcaacagccgtcctggctgttttacctgacgcgaggccgcgccaggctttacgccacgctagctaatggtcgcgtgtcgctgatcgatttctttgccgccccctgttttattggcgagattgagttaatcgataaagaccatgaaccgcgtgcggtgcaggctattgaagagtgttggtgccttgcgctccctatgaaacattaccgtccgctgttattaaacgacacgctatttttacgaaaactctgcgtcaccttaagtcataaaaattatcgtaatattgtttctttaactcagaatcaatcatttccgttagtgaatcgcctggcagcatttatattactctcgcaggaaggtgatctttatcacgaaaagcatacgcaagcggcagagtatttaggcgtttcttatcgacatcttttatatgttctcgcgcagttcattcacgacggtttattaattaaaagcaagaaagggtatctcattaaaaacagaaagcagttgtcaggactggcgctggagatggacccggagaataaattctccgggatgatgcagtaaaaattattttcaatagcgcgattgccggatgcaacgcttaatacgttttatccggtctacaaatcgagcattacgccagaccaataaagaacccggcaatagtcgcactcatcaggttggaaagcgttgctgctgccagcgcccgtaaaccaagctgggcgatttccggcgcgcgttttggcgaaatagccgaaaatgcgccaacgacaacaccgatagaaccaaagttagcaaaaccacaaagcgcaaaggagataatcgcaatggttttcacttccagcgtgccgcccgtttgcaggtatggggagaaactcaggtaagcgacgaattcgttaatcgccagtttctgcccaatcaggctacccgcaagattggcatcactccagtccacacccatgatccacgccagcggtgccagcacatagccaaaaatactttccagagaggcattggcgaaaccaaaccagccgccaattccgccgataatgccgttgatcagcgcaataattgcgacaaacgccattaccaccgtcgccacaccagcggcgatttttagcccggtcatcgcaccgctcgccgccgcttcgataaagctttttggcggcgtttcgctgaacgacagattttcaaatgtgacctgcgaaggctcggttgccaggctaagaatacgtgcaaacaaaatcccgccagggatcgccatcagcgatgccgctaacaggtagtcaattggtacgcccattccggcataaccaatcatcatcgaaccagcaatggacgccatcccgctacaaattgcggtaaacaactcgttgcgattcatgcgatcgataaacggtttaacgatcgccgggatctcattttgcccgaggaaaatagtagtaaccgcaacaaaagattcgattttgctgatgttgagggctttctggaaaatgctgccaaggatgcgaatcagcagccccatcacgccaatgtagtacagcagactgatgagcgcagtaacgaaaataatcgccggaagtacgcgaaaggcgaagataaaacccgcaccgtcaaacaggacatccattttcggcccaaccagcgaaccaaaaatgaaggcgctaccggcatcactgtaagacatcactttatgaacgcctaatgccgcctgttctactgcccattttcccggtgggaagtagagcatgatgccaccaatagcgatttgcagcagcagtgcggctccaaccgtgcgcaaactgatgctctttttattcactgacaacagaaatgctattgccagtaacaccaccatccccacaacacttctcattatatccataatgattttcccttcatgccggtaaacccggcgtcagcgccaggttttggtatgcttgatgagtacgggcgacggctttctgcccgtcagaaattaacccgcgagacgctgatattctttggcaatttcgctcgccagaatggcgttgttgaacaccagctggatgttggatttcaggctgtcaccgccggtcagttcagcaacgcgcgccagcaggaatggcgtactttctttaccaatgactccctgagcttcagcttcagctaccgcctgatcgatcgccgcattgatagtgtgttccggcatagcaaactgttccgggatcgggttcgctaccacgaggccaccgttcagaccgctttgccatttcaccgccattgcacgggcaatttcgctggcgctgtcgagacgaatgctgacgtcaaacgggctggtgcggcagaaaaacgcaggcagcgctttagtctgatagccaattaacggcacaccgaaggtttctaaatactcagtggttaatcctaaatcgagaatagatttcgccccggcacaaacaacggtgacattagtatttgccagttcttgcaaatcggcagaaatatcgaaggtatgttccgccccgcgatgcacaccaccaattcccccggtggcaaatactttaattccggcaagcgccgcaataatcatcgttgaagccacagtggttgcgccattttttccggcggcaacaacaaaaggtaaatcgcgacgactaactttggtcacgttatgcccttcacgacccagtaattcaatttcttctttgcttaaccccactttcatcacgccgccaataatggcgatcgtggcaggtacagcgccctgtttacgaatagtttcttcaacttcaattgcggtctgggcattttgtgggaacggcatcccgtgagaaataatggtcgattccagcgccacaaccggttttttgttttttaaagcgtcctgcacttccggggaaatttgtaataattcaggggaaatttttaattcagacattctgcgttctccactaacgatataacgttggcaatcgataaatcggggttattggtgtattcacaggagagcgccattgacgaacatccctgtgcgaaacgaacagattcggcaaacggcattccgtctacccaacacgaagcaagtcccgccatcatggcatcgcccgctccggtaacattaataacattggttttgatcggcgcagaccagccactttcaccgctgatatcgctgtaataaacgccgtcgccgcccatgctcaataccagtcggttcaggccatgttgatggaaccaggcagcaacttttgccacatcttcacgccctgacagcgcaatcccactcagggtttccgcttcaaggcggtttggcttgagagtgtggatctgatttagacggtcgcgcactttgacacatttccatgccgaaaccggatcgacaaatacgggtacgttggcagcattatccagaatccatgccagtgcctcttcactgatattacagtccgcgacaatgacctttgccctctgaataaattcacggtgctgtgcgagatattcagctgtaatagcgttgctaatattcatgtcatttatagcaaccagcatttcaccggtattatcgagtaatgataaatagctcgacgtattttctcccggcacaatcaggcatttatcgacataaacgccagattgattggtttgcgttagcagcgattggccataaaaatcactgcctacggcgctcagtagccaggctttattacccagcaacgccaggttttgtgcaatattgcgccctaccccaccaggcgtaaattttattttacctggatttgaatccgcataatttaatgattcatgtgaatatccggcgacatcaatattcgccgagcctataattacgacataatccttttcgcgcatagcacgtcctctggtaaaaaattaccaaccctgtcaatccacaagaatatagatactgcaaagacagtttaaacatgtgttcatatttaaacatgtgctcatagtatgcatgttttacgtaaagtaaattgccgccagagaggcaaagcgggcagatttgagcaggctcacaaaatgcgattaaatgccagaattacaaaagcgaggaatttgtgacgggatgcacagaacatgaacactaaaaaagggcagaaaagaatctgcccttgaggaaataaccttagtgtttgatgaacgtttcaggtttctactgaaagataaaaccatttaaattcataaaattacattcacaaaccggtcattctctttgcgctcatccaatgatacagggcagtaaaattctgccctgtaacacaccttttattacgcggctttcgctactgcgtccacttccggacgtttcaggaaggcataggccaaacccgccaccagcgtaccggcaataattgctaccaggtaacccagtaccggcgtaatagcgccagggatcagcagaacaaacagaccaccgtgcggtgccatcagtttcgcaccaatcgccattgagattgcgccagtcagcgccccacccacgatacagcacggcagcacacgcatcggatcacgagcagcaaacggaattgcaccttccgaaataaagcacagtcccagtaccagagcagctttgccaccttcctgctgcgctttgtcgaatttgcgacgcgccaccattgttgccagacccattgccagcggtggcaccatacctgccgccataatcgccgccatcgggccataggtttgagtactcagcagacccacaccgaatgcgtacgctgctttatttaccggaccgcccatgtcagtacacatcatgccaccgaggatcgcccccagcagaaccgcattcgcagtccccatggtctgcagccagtgagtcaacccttcgagaatgccagcaaccggtttaccgatcaggtagatcatcgccagaccgaccaccagactggaaattagcggaatgatcaggatcggtttcagcgcctccatactctgtggcagtttcagttgcgtactgattaacttcgcaatgtaaccagccaggaagcccgcaataataccgccaatgaagccagaaccggtgctgaccgccagcataccaccaatcagacccggcgtgagacccggtcgatcggcaatggagaaggcaatgtaacctgccagtaccggcaccatcagcgcaaaggctgaaccaccaccaatctgcatcagcgccgctgccaacgtacccggctctttaaacgcttcgataccaaaagcaaaagaaagcgcgatacacagaccacctgcaacgaccatcggcagcatgtaagagacacccgtcagcaagtgacggtatgcgcctgcactctctttcttaccttcagaggtcgccgtttgagctttgcccgccggttcatacggcgttgcttcagcaaccgctttatccagttcctgcgcggttttcttcagcgccagaccggtagaggtacgatacatcggtttaccagcaaatttcgccagatccacttcgatatctgccgccacaatcaccagatccgctgcggctacttcttcgggagtgattgcattacccgcaccaacagaaccacgggtttcaactttcacccaccagccacgttttttcgcttcggtttcaatggcttcagccgccataaaggtgtgtgctacgccagtcgggcaagcagtcaccgcaactacgcgtttcggaccgctggcggcaaccggtgctgtcgcagcgaccggcgcagtgtaaggtttcgcatggcctttggcttcactcaggaacagctcagggtgcgcaactgcccgggaaatatcgcccagccagacatttttaccgttcagcgcgctgtcattcgggatggaatcaccgagaacaatcgccatttctgcgtcgttcggattgtcgatgatttccagttttgcttttcgcgccgccgcgcccagcagggtcttcgccatataggcgcgtgcctgaccgagattagcgtcaataatcagcagcgttttcattatgcctctcctgctgtcagttaaaaggttgtaagtcgacgcgcgccatcattgcggccaactgcggacgatcggtaatacccacattgctttgacttaccgccagggctgcaacagcagtcgccagacgcagtgtgtgttcactggattcacgcattagcaagccataaatcaggccaccaaccatagaatcccctgcgccaacggtgcttacgacatcgactgacggtggtttggcgatccattcgccggaggcattaacccaaagcgcgccttcggcacccagtgaaataacgacatgcgcaataccttgttcacgcagcgcatgcgcagcttcaatcacatctttcatttcaggcagtttacggcctgcccagatttccagctcgcggcggttaggtttcaccagccacggtgccgctttcaaacctgctactaacgcttcacggctactatcaaagataatgcaaggacactgactacgcaggcgagtcatccagtcggtgaacgcttccgggctgacgcctgacggtaagcttccgctgacacagaccatatcgaactgaccgagccagctcagagaatcagtcacaaagcgttcccagtcggcggggttgacttcaaaacccgagaagttgaagtcggtcacttcgccgtctttttccgtcagcttaacgttaattcgggtgcgcccctgtacaacctggaaacggttggcaatgcccagctcgctgaacagttgctgaaaaccatcctgattgtctttacccaggaagccgccaacggtgacatcaattcccaggtcttttaatactttggccacgttgatgcctttacccgccgcatgcagaccggtggttttcaccaggttcacttcgccgcgttcaatttccgggcagaaaccaacaaggtcataagccggattaagggtgatagtagcaacacgtctgctcattatgcgccctccccaagaccagcagcgatagcgtcgccgattgctttcagcgcctgttcagcatctgcaccctgggcggtaaagcgtaggcgatgacctttcttaacgccaagtgccacaactttcatcagactacgtccgtttgccggtttgccggtaccatcaaggtttgtcacggtaatatcactgttaaattgtttaatggtattgaccagcatggtacctggacgagcatgcaggccgtgttcattgcgcaccacaaactccgcgcttaacacgtcgtcggtcggcgcatcatcgctggtcagcagcgccagcaacgttgccgcatccgctttcagcaagcggtcagctttattgtcgagcaataaatcagcgagacgcttaagaaccgcgatgggctgatcgtcattcatcgccacactcaccagcatggctgccgtttcgccgtccacatcaaaagcatttgccgcacggcttaccgcaatcgcgctacgcagattgccttcggcgctatcgctcagccagataccctgtccgagattcagcggttgttcattgatggctttggtgacgaaagtggcgtcaactgcccccgcctctttcagacgcgcagcgttcagcgcctgaagagtcagcagatcgctggcgacgatatccagtgtcagcatttcgttgtcgagcttcagctgctcactctgcttttcgcccatcagtaatgcgcgaagttcttctgctgttgttgctgacttcagttgttcagcaacggaatcatcgctcagtacgtgggtcagctggcgtagcaggcccagatgttcatccgagctggcagcaataccgattgccacgtacgctacctgaccgtcaccccaggtgacgccttccgggaactgaaatacctgaacgccggttttcagcacctgatcgcgggtgtcggtagtgccgtgtggaatagcaataccattgccgaggaacgttgaggtttgctgttcgcgcgccagcatgccattgacgtagccttctgctacattaccggcctgcaccagcgccgcagcgacctggcgaatcgcctcttctttgtctccggccttttcgcccggatggatgtcctgtacggataactggaacatagttctcctctcttgctgaattgaaacgattcagcctctatgagaaaaaaagcgccaacctggcttagggttaaagacaagatcgcgctgaaacgtttcaagaaagcataatacttctgtttcagcacgcaaggaaagccgtaaagttatgagcaaaagtttgatgtgctgcacaattttttgccatttttcctaattgctgatgggaaaatccgttatcagcaatttcatttcagcagcgtcagcagccaatcagcaacagtgaaatggcattttgattattcgtggcgcttttgatttcgctgtctgtttattttctgacaagcagcgtaaactccgcgtcttcctcttccagtgatcgaccagcatgcataactcccccgcagtctccagcgcgaaatcgtttgacctgacctcgacggcgtttttaatcgttgcctttctcaccggtattgcgggcgctctgcaaaccccgacactcagtatttttcttaccgatgaagtacatgcccgtccggcgatggtgggattcttctttaccggcagcgctgtcattgggattctggtaagtcagtttctcgccgggcgctctgataagcgcggcgatcgcaaatcgctgattgtcttttgctgcctgttaggcgtgctggcctgcaccctttttgcctggaatcgcaactactttgttttgctattcgttggcgtctttcttagcagctttggctcgaccgctaacccgcaaatgtttgcccttgcccgtgaacatgccgacaaaaccggacgtgaggcggtgatgttcagctcttttttacgcgctcaggtttcactggcatgggtcattggcccaccgctggcttatgccttagcgatgggtttcagctttacggtaatgtatctgagcgcagcggtagcgtttattgtttgcggtgtgatggtgtggctgtttttaccgtcgatgcaaaaagagcttccgctggcgaccggcacgatcgaagcgccgcgccgtaaccgtcgcgatacgctgctgctgtttgtcatttgtacattgatgtggggctcgaacagcctgtacatcatcaacatgccgctatttattatcaacgaactgcatcttcccgagaaactggccggtgtgatgatggggaccgccgccgggctggaaatcccgacgatgttgattgccggatatttcgccaaacgtctgggtaagcgtttcttaatgcgcgttgctgccgtgggtggcgtctgtttttacgcaggaatgctgatggcgcattcacctgtcattctgttgggcttgcagctgctaaatgctatttttattggcattctgggcggcatcgggatgctctattttcaggatctgatgcccggtcaggcgggttcagccaccacgctctataccaacacttcgcgcgtgggctggatcatcgcaggatcagtggcgggcatcgtcgccgagatctggaattatcacgctgtgttctggtttgcgatggtgatgattatcgccactctgttttgcttactgcggattaaagatgtttaaggcgcggtcagcatttccagatcgataagccaggtcatggcctgctgacgcgagttaccgcacatttcagcgctggcttgtaagcctgcacagactttcggtcgcagtggcgaggtgaaaattttacagcgttgctgttcatcaagctgaatgcagggcgtattggcgggcttgccatctggcataccgggaatagggctggaaattgaaggggcagtgcaacacgccccgcaacccggacggcattccatacgttgttctcttaaggttaaccaccggattgatgagcgcgcacagtaccaccttttttgcaccagcaaaagtgcgaataccacttgcccgaaaggcccgtcgcgagtactttgtcgcgatatttttgacattttcgactacaggaatttttcgatgccaagagcgaacgaaattaaaaaaggtatggtactgaattacaacggcaaactgctgctggttaaggatattgatattcagtcgcccactgcccgcggtgccgctacgctgtacaaaatgcgtttttctgatgtccgtaccgggctgaaagtagaagagcgtttcaaaggtgatgatatcgttgacaccgtgacgctgacccgccgttacgttgacttctcctatgtcgatggcaacgaatatgtctttatggataaagaagactataccccgtataccttcaccaaagatcagattgaagaagagttgctgtttatgccagagggcggcatgccggacatgcaggtgctgacctgggacggtcaactgctggcgcttgagctgccgcagaccgttgatctggaaatcgttgaaaccgcaccaggcatcaaaggggcatctgccagcgcccgtaacaaaccggcgacattgagcactggtctggtgattcaggtaccagaatacttaagcccgggcgaaaaaattcgtatccatatcgaagaacgccgttatatggggcgtgctgactaacttcagccgcatgcagaaaagggatagctcaggctgtcccttttttaatttattataccaatcttctattttgcgcttcctgaacaccttacgccctcaattttcactcgttgattgatcgccctcacacttcatcgcattaacaatccagaccaatttcaattgctgtcatataactttacactgtcgttgttaattaatcgttactaagacgtgactcctatgaatacaatcgcctccgttacgctcccgcatcatgtacacgctccacgttatgatcgccagcagttgcaatcacgtatcgttcattttggctttggagcctttcaccgcgctcatcaggcgttactgaccgatcgtgtgctgaatgcccagggcggcgactgggggatctgtgaaatcagcttgttcagcggtgatcaactgatgagccagctccgcgcacagaaccatttatataccgtgctggagaaaggtgcggacggcaatcaggtgataattgtcggtgccgttcacgaatgccttaatgcaaaactggattccttagcggcaattattgagaaattttgcgagccacaggtggcaattgtttccctgacgattaccgaaaaaggctattgtattgacccggccaccggtgcactcgacaccagtaatccgcggattattcacgatctacaaacccctgaagaacctcactccgcaccgggtattctcgtcgaagcactgaaacgccgccgtgagcgcggccttacaccgtttaccgtgctctcctgcgacaatattcccgacaatggtcatgtggtgaaaaacgcggtgctgggaatggcagaaaaacgttcgccagaactcgccgggtggataaaagagcacgtcagttttccgggaaccatggtcgaccgcattgttccggctgcaaccgacgaatcactggtggaaatcagccagcatctgggggtgaatgatccctgcgcgattagctgcgaaccgtttatccagtgggtggtggaagataacttcgtcgctgggcgtcctgcctgggaagtcgcaggtgtacaaatggtgaatgatgtcctgccatgggaagagatgaaactgcggatgcttaatggcagccactcttttctcgcttatctgggttacctctcaggattcgcccatatcagtgattgcatgcaggatcgcgcatttcgccatgccgccagaacattaatgctggatgagcaagcgccgacactgcaaattaaagatgtcgatttaacacaatatgcggataagttaattgcacgttttgctaatccggcgctgaaacataagacctggcaaatcgcgatggatggcagccagaaattaccgcaacgcatgctggcaggtattcgcatacatcaggggcgcgaaacggactggtcgttgctggcattaggcgttgcaggctggatgcgttacgtcagcggcgttgatgatgccggaaatgccattgatgttcgcgatccgcttagcgataaaattcgcgaacttgttgcgggcagcagcagtgaacaacgcgtaaccgccctgctttccctgcgtgaagttttcggtgatgatctgccagataacccgcattttgtgcaggccatcgaacaagcctggcaacaaatcgtacaattcggcgcacatcaggcgctattaaacaccctcaaaatttaacgatttctgcggttaaagcggatgaagctcaccttcgtccgctctccccttctcttttctgccttttttagccaggattaacgctcagttatcttaccagagtattgcggagccgttgtgaccaggaccaacctcatcaccggttttctcggcagcgggaaaaccacgtcgattcttcatctgttagcccataaagatcccaacgaaaaatgggcggtactggttaatgaatttggggaagtcggaattgatggtgctttgctcgccgatagcggcgcattgctgaaagagatccccggcggctgcatgtgctgcgttaatggtttacccatgcaggtagggttgaataccttactgcgtcagggaaaaccagaccgcttgttgatagagccgaccgggctgggccatccgaaacagatcctcgatctgttaaccgcaccagtctatgaaccgtggatagatctgcgcgccaccttgtgcattctcgatccgcgcttgctgctggacgaaaaaagcgccagcaatgaaaacttccgtgaccagctggctgccgcagacatcattgtcgccaataaatccgaccgtacgacgcccgaaagtgagcaagcgctacagcgttggtggcagcaaaatggtggcgatcgacaattaattcacagtgagcatgggaaagttgacggtcatcttctggatttgccgcgtcgcaatttagccgagttgcccgccagcgccgcgcattctcatcagcatgtcgtgaaaaaagggttagcagcgttaagcctgccagagcatcaacgctggcgtcgcagtctgaacagcgggcaaggatatcaggcctgcggctggatattcgacgctgatacggtattcgacaccattggcattctggaatgggcgcgacttgcaccggtggaacgcgtcaaaggcgtgctgcgtattcccgaagggctggtgcgaatcaaccgtcagggcgatgacctgcacattgaaacgcaaaacgttgcgccaccggacagccgtattgagctgatttccagcagcgaagctgactggaatgccttgcagagcgcgctgttgaagcttcgtttagcgactaccgcgtaaggttgcctgcgtttttcagtaagataattagagaaaatatgattaaaaatttgccgcaaatagtgttgttgaatattgtcggcctcgcgctgtttctttcctggtatatccccgttaatcatggattctggttgccgattgatgcggatattttttatttctttaatcagaaactggtcgaaagtaaggcctttttgtggctggttgcattgaccaacaatcgcgccttcgacggttgttcactgctggcgatgggtatgttgatgctgagtttctggctgaaagaaaacgcccctggcagacgacgtatcgtgattattggtctggtcatgctattaactgcagtggtattaaaccagctgggtcaggcattaattcctgtaaaacgggccagcccaacattgacttttaccgatattaaccgcgtcagcgaactgctctctgttcccacgaaagatgcctcacgagatagctttcccggcgatcacggcatgatgctgcttattttttcggcattcatgtggcgttatttcggcaaagttgcaggccttatcgcccttattatttttgtggtttttgcatttcccagagtaatgattggcgcacactggtttactgacatcattgtcggttcgatgaccgtgatattgatcggtttgccctgggtgttgctgacgccattaagtgatcgattaatcaccttttttgacaaatcactaccaggaaaaaacaaacatttccaaaacaaataactcacagtaattaacatcatcagggttatttttatagtgaggataatcctgatgatgcgcaccgtgctttcatctatcgaacgcaaaaatcattctctaagtaaatgaatggattgcatgcgtttcactcaattgtactttaattgaccaaccccgcttattaactttctgtatcactttttcttataaaaaatcatgtaaaaccgctcgccaagaccgcaccaatcgggtaatctcgaactcgttttgcctcggcggtagattatcctcacagcatataattttgtgcgttagtccacagatttggccttaaggaattgtttcaacatgcccaggtaattagtctcgtgtcgcttggcatttttttataacgatatttgtcgttaaggacttcaagggaaaacaaacaacatggtcaaatctcaaccgattttgagatatatcttgcgcgggattcccgcgattgcagtagcggttctgctttctgcatgtagtgcaaataacaccgcaaagaatatgcatcctgagacacgtgcagtgggtagtgaaacatcatcactgcaagcttctcaggatgaatttgaaaacctggttcgtaatgtcgacgtaaaatcgcgaattatggatcagtatgctgactggaaaggcgtacgttatcgtctgggcggcagcactaaaaaaggtatcgattgttctggtttcgtacagcgtacattccgtgagcaatttggcttagaacttccgcgttcgacttacgaacagcaggaaatgggtaaatctgtttcccgcagtaatttgcgtacgggtgatttagttctgttccgtgccggttcaacgggacgccatgtcggtatttatatcggcaacaatcagtttgtccatgcttccaccagcagtggtgttattatttccagcatgaatgaaccgtactggaagaagcgttacaacgaagcacgccgggttctcagccgcagctaataaaccgtttggatgcaatcccttggctatcctgacgagttaactgaaagcactgcttaggcagtgcttttttgttttcattcatcagagaaaatgatgtttccgcgtcttgatccaggctatagtccggtcattgttatcttttaaatgttgtcgtaatttcaggaaattaacggaatcatgttcatacgcgctcccaattttggacgtaagctcctgcttacctgcattgttgcaggcgtaatgattgcgatactggtgagttgccttcagtttttagtggcctggcataagcacgaagtcaaatacgacacactgattaccgacgtacaaaagtatctcgatacctattttgccgacctgaaatccactactgaccggctccagccgctgaccttagatacctgccagcaagctaaccccgaactgaccgcccgcgcagcgtttagcatgaatgtccgaacgtttgtgctggtgaaagataaaaaaacattctgttcatctgcgaccggtgagatggacattccactcaatgaattgattccggcgctcgacattaataaaaacgtcgatatggcgatcttacccggcacgccgatggtgccgaacaaacccgcaatcgtcatctggtatcgcaaccctttgctgaaaaatagcggcgtctttgccgctctgaatctcaacctgacgccttcactcttttatagttcacggcaggaagattacgatggcgtcgccctcattattggcaatactgcgctatctaccttttcttcacgtttgatgaacgttaacgaattaaccgacatgccagtccgtgaaactaaaattgcgggcattcctctgaccgttcggctttatgcagatgactggacatggaacgatgtgtggtacgcatttttactgggcggcatgagtggaactgtcgttggcctgctctgctattacctgatgagcgtacgtatgcgccccggcagagaaatcatgaccgccatcaagcgcgaacaattttacgtggcgtatcaaccggtggtggatacacaagctttgcgagtaacgggcctggaagtactgctacgctggcggcatcctgtcgcgggagaaattcccccggatgccttcattaactttgccgaatcgcaaaagatgattgtgccgctgactcagcacctgtttgagttaattgcccgcgatgccgcagaattagaaaaagtgctgccggtaggcgtcaaatttggtattaacattgcgccggaccatctgcacagcgaaagctttaaagcagatatccagaaactgctcacttccctgcccgcacaccatttccagattgtgctggaaattaccgagcgcgatatgttgaaagagcaagaagccacacaactcttcgcctggctgcactcggtcggcgtagaaattgctattgatgacttcggcaccgggcacagcgcgcttatctatcttgagcgttttacgctcgattatctgaaaattgaccgtggatttatcaacgccatcggtacggaaacgatcacttcccccgtacttgacgcggtgctgacgctggcgaaacgcctcaatatgctgacggttgctgaaggggtcgaaacgccggaacaggcgcgatggctaagcgaacgcggcgttaatttcatgcaaggctactggattagccgcccgttaccgctggacgattttgttcgctggctaaagaaaccgtatacgccgcagtggtaaggtgtgcttacgtcccttattattcatagtgaaagcatgccggattgcggctaatgatgagtaaaaggaaatccgttgcagatgattgtgcgcatactgctgctgtttatcgccctgttcaccttcggtgcgcaggcgcaggctatcaaggaaagctatgcctttgccgtgctgggcgaaccccggtacgcatttaatttcaaccattttgattatgtgaaccccgccgcgccaaaaggtgggcagataacgttgtcagccctcggcaccttcgataatttcaaccgctatgcactgcgcggcaacccgggcgcacgcaccgagcagttgtacgacacgctatttacgacttccgatgacgaaccaggcagttattacccgctgattgctgaaagtgcacgctatgctgacgattattcctgggtggaggtcgctattaatccgcgcgcccgttttcatgatggttcgcccattactgcccgcgatgtagagtttacttttcaaaaatttatgaccgaaggcgtgccgcaatttcgtctggtctacaaaggcaccaccgtcaaagccattgcaccgttaaccgtgcgcattgagttagctaaacccggcaaagaagatatgctgagtctgttttcgctgccggtatttccagaaaagtactggaaggatcacaaacttagcgacccgctcgccacgcctccgcttgccagtggtccgtaccgcgttacgtcctggaaaatggggcaaaatattgtctattcccgtgtgaaagattactgggcagcaaacttaccggtaaaccgtggacgctggaatttcgacaccattcgctacgattattacctcgatgataatgtcgcctttgaagcgtttaaagcaggtgcctttgatttgcgtatggaaaacgacgccaaaaactgggccacgcgttataccggtaaaaatttcgataaaaaatacatcatcaaagatgagcaaaagaacgaatcagcccaggatacgcgttggctggcgtttaatatccaacgtccggtattcagcgatcgccgggtccgggaagctatcactctcgcctttgactttgaatggatgaacaaggcgttgttttacaatgcctggagtcgcacgaacagttattttcagaataccgaatacgcggccagaaattaccccgacgccgcggagctggtgcttctggcaccaatgaaaaaagatctaccgtcagaagtcttcacacaaatctaccagccgccggtatccaaaggcgatggctacgatcgtgacaacctgttaaaagccgacaaacttctcaacgaagcgggctgggtgctgaagggtcagcaacgcgttaatgccacaacgggtcagccactcagctttgaattattgcttcccgcaagcagcaatagtcagtgggtattgccgttccagcacagcctgcaacggctgggtatcaacatggacattcgcaaggtggataactcgcaaatcactaaccgcatgcgcagtcgcgactatgacatgatgccgcgcgtatggcgggcgatgccgtggcccagttccgatttacagatttcctggtcatcggaatatatcaattccacttataatgcccccggcgtgcaaagcccggttatcgactcgctgatcaaccaaattattgccgcgcagggaaataaagaaaaattactgccgttggggcgagcactggatcgcgtattaacgtggaattattacatgctgccaatgtggtacatggcggaagaccgtctcgcctggtgggataaattctcccagccggccgtgcgccccatctatagcctcggtatcgatacctggtggtatgacgtcaataaagcggccaaactgccgtccgccagcaaacagggagagtagatgggcgcttacctgattcgccgtctgttgctggtgatcccaacattatgggcgattatcaccatcaactttttcatcgtgcaaattgcgcctggcggtccggtcgaccaggccatcgccgccattgagtttggtaatgccggagtattacccggcgcaggcggtgaaggtgttcgtgccagccatgcgcaaacgggtgtcggcaatatcagcgacagtaattaccgtggcggacgcggattagatccagaagtgatcgctgagatcactcatcgctacggttttgataagccgatccacgaacgttacttcaaaatgctctgggactacatccgctttgattttggcgatagcctgtttcgcagcgcctcggtgctgacgctgattaaagacagtctgccggtttccatcaccctcggattgtggagcacgctgattatctatctggtgtcgattccgttaggcattcgcaaagctgtttataatgggagccgctttgacgtctggagtagcgcatttatcatcatcggctacgccattccggcctttttgtttgccatcctgctgattgtcttcttcgcgggcggcagctatttcgacctgttccctctacgcggcctggtttccgctaactttgattcgctgccgtggtatcagaaaatcaccgattatctgtggcatatcacgctgccggtgctggcgacagtgattggtggctttgcggcgctgaccatgctgacaaaaaactcattccttgatgaagtgcgcaagcaatacgtggtgaccgcgcgtgcgaaaggggtaagtgaaaaaaatattctctggaaacatgtgttccgcaacgccatgctgctggtgattgccggttttccggcgacgtttatcagcatgttttttaccggctcgctgctgattgaggtgatgttttcactcaatggtctgggcttactgggctacgaagcgaccgtctcgcgcgattatcctgtaatgtttggtaccttgtatattttcaccctgattggcctgctgctgaatattgtcagtgatatcagctatacgctggttgatccgcgtattgattttgagggacgttaatgtcgcgactcagccccgtcaatcaggcccgttgggcgcgttttcgtcataaccgtcgcggctactggtcgttatggattttcctcgtcttgtttggtttgagtttgtgttctgaacttatcgccaacgataaaccgttgctggtgcgttatgacggcagttggtatttcccgttattgaaaaactacagcgaaagcgattttggcggcccgctggcaagtcaggctgattatcaggacccgtggctgaaacaacggctggaaaataacggctgggtactgtgggcaccgattcgctttggtgctaccagtatcaactttgctaccgataagcccttcccttctccaccctcccggcaaaactggctgggaacggatgccaacggcggcgatgtgctggcacgcattctctatggcacgcggatctcggttctgtttggcctgatgctgactctctgttccagcgtgatgggcgtgctggcgggggcgctacaaggctattacggcggtaaagtcgatctctggggacaacgctttattgaagtatggtcggggatgccgacgctgtttttgattattttactttccagcgtcgtacagcctaacttctggtggctgctggcaattactgtcttgtttggctggatgagtctggtcggcgtggtgcgggcggagtttttacgtactcgtaatttcgactacattcgtgcggcacaggcgcttggcgtcagcgatcgcagtatcatcctgcgtcatatgttgcctaatgccatggtcgcgaccctcacctttttaccgtttattttatgtagttcgataaccaccctgacctcgctcgatttcctcggcttcggtctaccgctcggttcaccgtcactcggtgaactgctgttacaagggaaaaataaccttcaggccccgtggcttgggatcaccgccttcttgtcggtggcgatattattgtctttgctgatctttattggtgaagccgtccgcgacgcatttgatcctaataaggcggtgtagcatgacgcaaactctgttagcgattgaaaatttgtcggtgggttttcgccatcagcaaaccgtacgtacagtagtcaatgatgtttcactacagattgaggctggcgaaacgctggcgctggtgggtgagtcaggttcaggcaaaagcgttaccgcgctgtcaattttacgcctgctcccttccccgccggttgaatatctctccggcgatattcgttttcatggcgaatcgctgcttcacgccagcgatcaaacgttgcgcggtgtacgcggtaataagatcgccatgatttttcaggaaccgatggtgtcgttaaatccattgcataccctggaaaaacagctttatgaagtgctttcactccaccgcgggatgcgtcgggaagcggctcgtggcgaaattcttaactgccttgatcgcgttggtatccgccaggcggcaaaacggctgacagattatccgcatcagctctccggcggcgaacggcagcgggtgatgattgcgatggcgctgttaacgcgaccggaattattaattgccgatgaaccgaccaccgcactggacgtctctgtccaggcgcagattttacagctgttgcgcgaactgcaaggcgagctgaatatgggcatgctgtttattactcataacctcagcattgtcagaaaactggcccaccgcgtggcggtaatgcaaaacggtcgctgtgtcgagcaaaattacgccgctacgctatttgcatcacccactcatccttacacacaaaagctactcaacagtgaaccgtcaggcgatccagtgccgttgccagaacctgcctcaacgttgctggatgttgaacagcttcaggttgccttccccattcgcaaagggattttgaagcgcattgtggatcataatgtggtggtgaaaaacatcagttttacgctacgagcgggtgaaacactgggtttagtgggcgagtccggttccgggaaaagtacgacgggactggcgctgctgcgactgattaattctcagggcagcatcatctttgacggtcagccactgcaaaatttaaatcgccgccagctgttacctattcgtcatcgcattcaggtggtatttcaggatccaaactcctcgctcaacccacgactcaacgttttgcagattattgaggaaggcttacgggttcaccagccgacgctttctgccgcacaacgcgaacaacaagtgatagccgtgatgcatgaagtgggattagatcctgaaacacgccaccgttatccggcggagttctctggtggtcagcgacaacgtattgcgattgccagggcattaattcttaagccctcgctgatcatacttgatgaaccgacatcatcactcgacaaaacggtacaggcgcaaatattgacgctattgaaatcattgcaacaaaagcatcaactggcctatttgtttatcagccacgatttgcacgttgtccgcgcgttatgtcatcaggttatcatactgcgacaaggggaagtagtggaacaaggaccgtgcgcgcgcgtgtttgccacaccgcagcaggagtatacgcgtcagctactggcgttgagctgacgcttaaaaaggattgtagtttgaaaagggttcggcaattgccacaccaaaatttttcaatcggcatgttgcagcaaactcgtcctggcgatttacaaacaggcacggctcaccttcacactccagcaccgaacatggaacttcgatgtcgcttaacgcctggcttagtttatacatcaccgaccatgcattatcaccatccgggctaagcaatttaagcgccaccaggctgttgtcaccgcacggtccattttgcggaatcggttcaaccttcgaacctgcgaaaccagcagaccagcgatagttctgcggcagtcgatggacgattgagagttgtaatgaagtcacttattttccccggaagcacattcacttcacaatttgtttacatcaattttaacacatcatcaacaatccgtctttatacagatcgtaaagattgatgcctcgcctgcgtggcctctatggctctgatttaagtaatatctgcgggcgtggtcacgtttgcggggctatatgtacccgtttctgcgatctaactcaacctttttaactacaatgatgtgactttttacataaattgattttacataaaataaacatatatcgggggaatgatagatttgtggttgacatgcatcaacaaaggaagccttttagcttcctcgttgtgcaatagatcaccgttttttcggccgactggcgtacagacagaagagaatggagctggttgcgcagaatgcaattgaccaaatcatcggccatgcagagttaaaggtcgcaagagaaagcaatgcgccaacaattgcccctatgccaaaacggaaggttcctgccagcgaagatgccgttcccgccatatggggaaactcatcaagaatgaccgccatcgcattggatgacaccatcgacacgcagcccacaaacgccgcaacgccaaccaccagcgaccaaaatcccagccccagcagcgcactgatgaccatccacgctgccataataaattgtatccacaaccccgagcggaacatatttaacgcgccaatgcggcggacgaagcggctgttaaagatggtcatcacgaacagaaaaacaatgtttagcgcaaagtaataaccaaagttttccggcgcgacgtggttaatttcaatataaacaaacggtccggcgcttaagaatgagaacatcccggcaaagctgaaaccactggcaagcatgtagctcaggacacgtttatggcggaacagcgccgcaaagttaccaatagtggtacgaatgtgaaatggctgacgacgctccggtggtaaggtttctttaatcaggaagaaaatcattgccgaagccagaatcgccgctaatgccaggatccagaagatgtaatgccagctcagccacaccagcacccagccgccaactatcggtgccatcagcggtgcaatggttgtcaccagcatgacaaacgacatcatccgcgagaactcttctttcgggtaaatatcgcgcatcagggcgttaatgaccacgctggccgcagccgcagccagcccgtggaagaaacgcatcacaatcagctgatcgatggtgtttgccaacgcacacgccaccgcggcggcggcaaacaccagcgtaccgccgagcaccaccggcttacgcccgaagctgtctgccatcggcccgtagattaactgccccaacgcaaagcccagaatgtaagtactgagggtcatctgcgtactgcccgccggtacgccaaactgcgctgaaattaccggtagcgcgggcagatacatatcaatcgacagcggcatcaacatggccagcaggccaaggataaaaacaatagcaaacgacgaatgctgtcgggtggtcacaacgggctcctgaaagtcattgaaaagttagacgacgctggcaatttcttcttcagttaacggacgatattcaccgggggctaaatcagcatccagcgtaataccgccaatacgttcacgatgcagctcaaccacgtggttacccacggcggcgaacatgcgtttcacctgatgataacgcccttcgctgatggtcagacgaacctgcgttggggtaatcacttccagcaccgcaggcttagtgagatctttttcgttatgcagctgcacgcctttagcaaattgctctgccgtatcgtcagctacaggtgattccagtgtcaccagataggtcttctcgcaatgatggcgcggagaagtaatgcggtgcgaccactgaccatcatcagtcatcagcaccagaccggtggtatcaatatccaaccgccccgccgcatgcagtttccacgctaccggttcatcaagaaaatagagcaccgttgggtgatcagggtcgtccgtggagcaaacatagccctgaggcttattgagcatgaagtaacgtggaccgtgttgctgcgccagcgggttgccatcgtaagcgacatcatgttcaggaagcagtttgaacgctgcattacggacgatttcgccatcgacggtgacacgattgccgcggatttcacgcccggcaatagcacggctaacgccgagttgctgtgcgataaatttatcaagtcgcatgtgtgtgattttgcctgtaaaaacggaggtcgggcattgacccgaaaatctgaactgttgtctgcccagtatagcggtctaataacatccctcaagggaaaaagatccatggcatactattagcagaataatctacctacgcgagaccatgatttttacacttcgcccatatcagcaagaagccgtggatgccacgctcaaccattttcgtcgtcataaaacccctgccgttatcgtgctgcccaccggcgcaggtaaaagcctggtgatagcggaactggcacggctggctcgtggtcgcgtgctggtgctggcacacgttaaagaactggtggcgcaaaaccatgcaaagtatcaggcgctggggctggaagccgatatttttgccgccgggctaaagcgcaaagagagccacggtaaagtggtatttggcagcgtgcagtctgtcgcccgtaatcttgatgcctttcagggtgaattttcgctgttgattgtcgatgaatgtcaccgtattggtgacgatgaagagagccagtatcagcaaatcctcactcacctgacaaaagtgaatccccacttacgcctgctggggctgactgccacgccttttcgattgggcaaaggctggatctaccagtttcattatcacggcatggtacgcggcgatgagaaagcccttttccgtgactgcatttatgagctgccgctgcgttatatgattaaacacggctatctgacgccgccagaacgactggatatgccagtagtgcaatacgatttcagccgcttgcaggcacagagtaacgggctgttcagcgaagctgatctcaaccgtgagctgaaaaaacagcaacgcattacgccacatatcatcagccagatcatggagttcgccgaaaagcgcaaaggggtaatgattttcgccgccaccgttgaacacgcaaaagagattgtgggattactgcctgccgaagatgctgcactgattactggcgacacccccggcgctgagcgcgatgtgttaattgaagattttaaagcccagcgttttcgctatctggtcaacgtcgcagtactgaccaccggatttgacgccccgcacgtcgatcttatcgccattctgcgccctaccgaatcagtgagtctttaccaacaaattgtcgggcgcggtctgcgtctcgctccgggcaagactgattgtttaattcttgattatgcgggtaatcctcacgatctctacgcgccggaagttggtacaccgaaaggcaaaagtgacaacgttccggtacaggttttctgccctgcctgcggttttgccaacaccttttgggggaaaacgaccgccgacgggacattgattgaacactttggtcgccgctgtcagggatggtttgaagatgacgacggtcatcgcgaacagtgtgacttccgtttccgttttaaaaattgcccgcaatgtaacgcagaaaatgatattgccgctcgccgctgccgcgaatgtgacacggtactggttgatccggatgatatgttaaaagcggcgctacgactgaaagatgcgctggtattacgctgtagcggcatgtctttgcagcatgggcacgacgagaaaggcgaatggttgaaaatcacctattacgatgaagacggcgcggatgtgagtgagcgtttccgtctgcaaacgcccgcccagcgaactgccttcgagcagctttttatccgcccgcatacgcgcacaccgggcatccctctgcgctggatcaccgccgccgatatcctcgcccagcaagccttattgcgacacccggattttgtcgttgcccgcatgaaaggtcagtactggcaagtgcgtgaaaaagtgttcgattacgaaggtcgttttcgtcgggcgcacgaattacgcggttaatggtagttttgattgatgtataaagcgattgagtatagaatctcgcccgcttttgcatacgcaaagcagatcacttacctgttgctgggtcgcctgtagcaggattaatttaagagagaaagaaatgtttactatcaacgcagaagtacgtaaagagcagggtaagggtgcgagccgccgcctgcgtgccgctaacaagttcccggcaatcatctacggtggcaaagaagcgccgctggctatcgagctggatcacgacaaagtcatgaacatgcaagctaaagctgaattctacagcgaagttctgaccatcgttgttgacggtaaagaaatcaaagttaaagctcaggacgtacagcgtcacccgtacaaaccgaagctgcagcacatcgacttcgttcgcgcttaattgctgaataagttgtaaaaaaccccgctccggcggggttttttgtatctgcagattatgcctgattacggtattgctattttttgcaggccagataaggcgttcacgccgtatctggcattcagaacacaaaaccgattaattgccgccagacgtccggcgctgcaattggtcgcgcaaattcggcggcgtgcctttaatggtcaaggtatcggttgctggatcccagaagatgcgttcacctaacagaatcgcatcaaagttaatagtcaagccaccgccgctaccggcaaacttcgtcaactgacgcagtgtgctacggtctgccgggaagctctcttccagttcgtagcctttttcagccgcaaactccgtgaagctcacttcgcttacgcctgccagctctttcgatagcgactccagttcaatctcttcgcctgcctgcagctgctcattacagtagctataaacctgctggcgcacgttctgtcgctctgctttatccagttgtgcttcggcagtgaaatcatcaaccgcttgcaacagcccacggttttgcgctttcgcgtttaacccttcgctggccccgaggaaatccataaagaaatccgccactttgcgccctactcgccctttcaggaaagtgagatagcgggtggactctggattggtttcccattcggttaaatcgatacgcgcaacaatatccgcatgattgatatcaagataatgggttggattgatgtcgagattttcgttaacgcgcatactgctcaggttgctcagaactgccaccagcagatactccaccgccagataacggtagtggcaaaacagcacgaatccaccgtcagcaaaaggatatttcgctaattcgtcacgcaggcgcccggttgccgcgcggctaaatgccagaaagtcctcttcgccctgacgctgtaagcgcagcgtctgcgccagttcactctcttcgctaaacaagccgtaagctttatttttggcgctatagacccgatgcagttctgccaccatctcaacgacggtttctgtcggttccagcaatgaatcgcgcaacaccagctcaaggttctgctcatcacgcttgataagctggtgcagagcaatctggttgatatccagactcatgataaactctcctttaagaccgggcggtattcaaccaccgccggttaagcgacgcaataaaagatggcggtcattttacagaaggcagcgtaacgagaatgatttaacgcataaaaaagcagaaaaaaaaccgttgctacggtaatatgttgccctttcatcaactaactgatttcgatttatgccacaaatttcccgctacagtgatgaacaggttgaacaattgctcgcagagctgctcaacgtactggaaaaacataaggctccgaccgacctttccctgatggtgttaggcaacatggtcactaaccttatcaacaccagcattgccccggcccaacgccaggcaattgccaactcttttgcccgcgccttacagtcctctatcaacgaagacaaagcgcactaagggaaacagataacaggttatggtaactcatcgtcagcgctaccgtgaaaaagtctcccagatggtcagttgggggcactggtttgcactgttcaatattctgctttcgctcgtcattggcagccgttacctgtttatcgccgactggccgacaacgcttgctggtcgcatttattcctacgtaagcattatcggccatttcagcttcctggtgttcgccacctacttgctgatcctcttcccgctgacctttatcgtcggctcccagaggctgatgaggtttttgtccgtcattctggcaacggcgggaatgacgctattactgatcgatagcgaagtctttactcgtttccatctccatcttaatcccatcgtctggcaactggttatcaacccagacgaaaatgagatggcgcgcgactggcagctgatgttcatcagcgtgccggttattttattgcttgaactggtgtttgcgacgtggagctggcaaaagctgcgcagcctgacgcgtcgtcgacgcttcgcgcgcccgctggccgcattcttatttatcgcctttatcgcctcgcatgtggtgtatatctgggccgatgccaacttctatcgcccgatcaccatgcagcgcgctaacctgccgctttcgtacccgatgacggcgcgacgttttcttgagaagcatggtctgcttgatgcgcaggagtatcaacgccgtcttattgagcaaggtaatccagacgccgtttccgttcagtatccgttaagcgaactgcgctatcgcgatatgggcaccgggcagaatgtgctgttgattactgtcgatggcctgaactactcacgcttcgagaagcagatgcctgcgctggcaggttttgctgagcaaaatatttcgttcacgcgccatatgagctccggcaacactacagacaacggcatctttggcctgttctatggcatctcgccgagctatatggacggcattctgtcgacccgtacgcctgcggcattaattactgcgcttaatcagcaaggctatcagctggggttattctcatcagatggctttaccagcccgctgtatcgccaggcattgttgtcagatttctcgatgccgagcgtacgcacccaatccgacgagcagaccgccacgcagtggatcaactggctgggacgctacgcacaagaagataaccgctggttctcgtgggtttctttcaatggtactaacattgacgacagcaatcagcaggcatttgcacggaaatatagccgggcggcaggcaatgtcgatgaccagatcaaccgcgtgctcaatgcactgcgtgattctggcaaactggacaatacggtggtgattatcactgccggtcggggtattccactgagcgaagaggaagaaacctttgactggtcccacggtcatctgcaggtgccattagtgattcactggccaggcacgccggcgcagcgtattaatgctctgactgatcataccgatctgatgacgacgctgatgcaacgcctgctacatgtcagcacacctgccagcgaatattcgcaaggtcaggatttgttcaaccctcaacgccgtcattactgggttaccgcagcggataacgatacgctggcaattaccaccccgaaaaagacgctggtactgaacaataacggtaaataccgcacttacaacttacgtggtgaaagagtgaaagatgaaaaaccacagttaagtttgttattgcaagtgctgacagacgagaagcgttttatcgctaactgattaattataaatcagttagcgaaatatcttacttgcaatcggtgtggaaaacggtagtattagcagccacgagtcggcacgtagcgcagcctggtagcgcaccgtcatggggtgtcgggggtcggaggttcaaatcctctcgtgccgaccaaaaatcccaagaaaaaaccaacccttacggttggtttttttatatctgcaattaattcgataaacagaccgtgacacatcacagcctgtttattttctgttatcagaacgtccagaccacacccgcctgagtattccacggcgattctacccctgcgccattgccatagctgactgacaaatgaccgcttaacgtcggggtaaacgatgaccttataccagcctgataaacgccactggttccagccacatcattattaaatttgccatcgtcattaactttcacctggttagaatcggcgtattcctgacgcacggccgctttcagccagggttccagcgtcgtaccgttttgcaggtccatgtgatagcttaccgccgttcccgcttcagcgcgtaatatccgggtatttcccacatccgcgcgcatgccgtttgataacgtgtagtcctgaccatctgtggtaaagccggtaaaggccagatagggtctaacactccacaatccgtcaacccaacggaacccgctctcaacatgagcacccgcgccgttactattgtaatcgccaaacgctgttgccccattactcatcttgccatggatggtgttggcaaaacggtcaactttcaccaccccatcaacataggcaccgttctgatgctcccaaccggcataagcccccagggtatagctatcgatattacctttgccgccgcgatcaaaaccaatatcagaatgagagtaaccaaagatcaagccgcgaattgtactgctttcttcacgggagaaacggctatcgataccgagcgtcaggcccgtcaatgtttgctcaaaaccagctcccgcatcagtggtcacgttgttgcgggtgttaattgccgaactccacatcgccgtatcgtaactaacgccttttacgctaccaagacgctcacgcacggtgtccagttctgcatcaaataccagcggttgtgcggccgccatattcagcacatcagtggttgaaggggtaatttgcgcgcgattctctgccagactccagctatggttgccattatccagcaaggtatattcatacgtaccgatatcaacaacgcctccggcattgcccaacgtaaatgcagcatcaccgccgcccgttgttaccagtgtaaggctatctcctgctgccgggctggcaccggtgtccgtcacgaatattttgaaatcacctgttgcctgaccggtgacgttgagctgatcgctctgatgattagccatatcggtacgcatataaaaattgccgtttcccgacagggtattggtggtcaacgtaatgaaattttccgcacttgccgtcactgatgaacgagtcactggctcatccatcataatcacatttgcgtcagacatcgcaaggttggctaagttgaggagggtgttttggttcgtcgtagtgatatcggcaatgatggtccatacgctattttcgagcgaaacgtccgctttgctggtatccacggcaccatgcgttctaaaagaagcgccctcagaaaccactaccttacccaccaacattgcgggtgcataatttatttgcggcttcatgacctcaagaatgccatcattccctctgactgaaacgttaaccattgtgccagcccagacgttagcgcggccattgttgataaccatattttcagagatggcttttgaggaatacgtgatacttccattctgatatgatcgaccgagatcatataccgcatttgcctgcactttcgtaccagtatcctttcccagcgattgcatagtggcatgcttatcaaggatagtatcaatggcctgcgtgtcctccataacaatgagcccggaaccatcatccagttcataattttttgacacaccatcttttatactaaattggcctttactgtttggaccactcacttccagcgcattcgttgagacaattaattttccgcctgcttttttatcaacgccagttacagtcccgccatccataacctccagtaagccgccactatctacagtagtattataagcgaagtcattttcttcaactcgcaaacttccgccgttttccaacagcatattgttagcaataccattcttgatttcgaactgaccgagacggtttgttccgaatacctccatgacccgcgtggttgctttaatagcaccgcctgctttctgatctaccgcaaatgcaaatcccccctctttaacctccagtaatcctcccttttcgatagcggcaaagacggtccccccatctttttcaacgattaagcgcccgcctttaatcgtgggatcattcgccgcgccataaacctgtagcactccattattgatcgtagtctggtttgccgcgccacccatttgaacaatttgataaccgtcatttaatactgagtattctgcggcgccattcatttcaatgtactgataccctccgttaatttcagtattattacttacaccaaattcttttatatgctgttctccgccaggattgattttcgtattattggcggtcccataaaccagctggatatctttttccaggacaacaccatcaactgtctcaccatactcaacagttgatgccaatgctatgggtgaatataacgctgtagccaccagaacagatattgcggaacgacaaagagaaacagaaccagattgatgcattgagctttcatcctatgaaattaattgctgttaaaagcattgggtacagaaaatacccatagctccatacccggagtcagtttttaaaaactgtttaaagaaatgcacaagtattgtgattgattttttagttgtttttcttgatgagaagctgatgcaaaattccgtctttataatgaaaatgatgccaaagcgaacgacaaggttgtagttttcactacatgtccatacataaaatggggtaacattcacgcgcctggtagcgttaccaacgctacgctcaaacataatgattctaataaaacctcaggagactactatgcctgaagcaacgccttttcaggtgatgattgtggatgatcatccacttatgcgacgcggtgttcgtcagttactggagcttgatcctggctttgaagtggtcgccgaagcgggcgacggcgcgagcgctatcgatctggcgaatagactggatatcgacgtgatcttgctggatctcaatatgaaaggtatgagtggcctggatactctcaatgccttgcgcagggatggcgttaccgcgcaaattattatcctgaccgtatccgatgcctccagcgatgtctttgcgctgatagacgcaggcgcagacggttatctgttgaaagacagcgacccggaagtattgctggaagcgattcgtgccggagcgaaaggcagcaaagtctttagcgaacgcgtcaatcagtacttacgtgaacgtgaaatgtttggcgcggaagaagatcccttcagcgtgctgacggagcgcgagctggatgttctgcacgagctggcacaggggctgtcaaataaacagattgcctcggtgttgaatatttcagagcagacagtaaaagtacatattcgcaatctgctgcgcaaactcaatgtccgctcacgcgtggcggccaccattctgttcctgcaacaacgcggggcacaataaaaatagcccgatggatttatcatcgggctgagatttatgacaaacgcaaaactgcctgatgcgctacgcttatcaggcctacgtggatcgatcaatttattgaatttacacaattttgtaggccggataaggcgttcacgccgcatccggcataaactaagcgcactttgtcaacagtctagcccgatggcatcaccatcgggcctctttttatttactctcctgcggcgacaaatgttgcatcgcctgcgcgatactacgttcaatcaccgcacggcgagtatcgttggcaggtaagagtttcaacatcatctcccacgcggcaacggcttcgccaaatcgctgctgctcaaaggcattaaacgcatacatgcttagcacacggatattgctatggtccgttctcaccagctgacgtagcagttcaccgccgaggcggttgtcgttgggatcagatgaacgagtcaacgcttcagcgtatcccagtgcagcatcactgtttttcggatcgaggcgatacgcagtggcgtatgcatcggtggcgatactggcgttacccagcgccatgccaacgcggcccaacataatccagccttctatatctcccggatttttttgcagttgagtacgcatccccagcgcaagacgcgacatctcttcttcgttgagcggatcggctttcggatccagcgccctgtccagcaacgccggagtctgtgccgtggcctgctgccagattttcacctgctgataattgccagtctggtagtagctgacgccagccacaattaacgccaccacaatacccggcagataaacaacatatccggcacgcttaccttccggcacgctttgttcaggaaacgcttccggcaccacgcgtacccgacgccgcgagcgggcgtatatgacccaaccgccaatgccaatagccactactggcagcacccacagcagcacggtcagcggcgttaacggcggatcgtaagtgacgaagttgccgtaacgcgccaccatataatcgacaatctcttttttacttttaccttcctgcatcagttcatacactttctgacgcaggtcggtggcaatcatcgagttggaatcggcaatgctgttgttctggcatttcgggcagcgcagttcttcagtgagctgacggaactgttgttcctgtgcttcatctttaaactgcaacacatcgatggtcgccagcgctgagccggagatcatcagcatcagcacgcccaataaaaacctcattgtgcggcctccttactgtatttctcccacagcggcttgatctcttcttcccagacgcgaggattcagatcgcccgcatggcgatagcgaatgatgccgttgccgtcaataagaaacgtttctggcgcgccatagacaccgagatccagccctaacatgccatcgccatcaaacaggcttagcgcgtaaggattgcccagctctttcagccagctgattgccttctggcgatcgtctttatagttcatgccgaccacgcggatgccctgcgcagaaagctgattcagatattgatgttccgcacggcaggtcggacaccaggtcgcccagacgttaagcagtactggtttgccctgagtcagcacatccgcctgataaaactgccccggattgtccagtgattcgagacgaaacttcggcacaggcttgccaatgagcgccgattccagattggtcggatcatccccttcggcattacgcgccagctgccacagcagcgccgcggcaatcgccaggaagataatcaacggaattaacaatactttgcgcttcatacggcctccggcgcagttttttgcggactcacgcgcttacgatagcgaggatcaaacagacacagcagtccgcccaacgccatcatcagcccgcccgcccaaatccagcgaacaaatggtttgtagtaaagacgcacggcccacgcgccgttttccagctcttcaccgagcgcggcgtacaggtcacgcgtgatgccgccgtcaattgccgcttcggtcatcatcgacccggcagtgttgtaatagcgtttttccgcatacagcactgtttccggtttaccctctcgcgttacgccgatagtcgccacaccgccacgccagttcgggccagtcacctctttgacatcacggaaggtgaagcgatattcatgaatatcgacgctatcgccggacttcatgcgcacatcacgctcaacgctgtagttctgactaaaggcaatgccaacaattgtcactgccagccccaggtgagcagccaccatcccccaataactgaaggtggttttcgtgccgcgtgaaatacgcagcacagcttccgcaattgccagcaccgcaatccagcaggccattgccaggccgagcaccgtcattgccacaactttgctttcgaacagccacggcaacagcagagacagcaccagcgtagagatgaaggcgataatcaataaattgcggattttacgtgggctatcgcgcccccagcgcaccagaggaccgacacccagcagtagcgcaaacggcaccatcagccaggtaaacatggtgttgaagaacggttcgccaatcgaaatactgcccagtcccagttgcttgtgcaccagcggcagcagcgtccccagtaataccaccagcatcgcggcgaccagcaaaacgttgttcgctaacagcaaagattcccgcgaccacagcgcattgtttacgcgtgagcgaactttgtgtccacgcgcggcaaacagcagcagcgaaccgccaatcaccagcaccataaaggcgaggataaacataccgcgcgccggatcagacgcaaacgcgtgtaccgataccagcacgccggaacgcacgaggaaagtccccaacagacacaacgagaaggcactgattgccagcagtaatgtccacgctttgaagctggcgcgttgttcagtgaccgccagtgagtgcatcagcgcagtccccaccagccacggcataaacgaggcgttttctaccggatcccagaaccaccagccaccccagccgagttcgtaataggcccatgcggaaccgagcacgatgccgagcgtcaggaagatccacgctgccagcgtccacggacgagtaaaacgcgcataagtgctgtccagacgcccgctcagcaaagaagcaatggcaaaagcaaacgccaccgagaaacccacgtaccccatataaagcagaggcggatggaagatcagccccggatcctgcaatagcgggttaagatcgcgaccttcaatcgggaagttcggcaacgtgcgagagaacgggttagaggtaaagagaatgaacagcaaaaagccgacactgaccatccccattatcgccagtacacgggccacaatatccagcggaatacgctgactaaaaatcgccaccgcaaaggtccagccgctcatcagcagcacccacagcagtagcgagccttcatgcgcgccccaggtagccgccacgcgataccacaccggaagctgggtattggagttgctggcaacataggtgacggtgaagtcgttgaccacgaaagcattgaccagcaccagaaatgcgccagccacagacataaacagcagccaggcaaacaagcgggaagacgccatcatgcgcgcatctccgcgcgccacgccccatagcggatacacggacagcagcagcgcaattcccagcgccaggcacagcagtccgttaccaatttctggcatcatgatgctgggtccttataaacactcgccgggcgacggtggttagcttccatcgctttctcaacttctggcggcgtatagttttcatcgtgtttcgccagcacttctttcgcgaggatatgattgcctttttccagttcgccctgcaccacaacgccctgcccttcacggaacagatccggcaaaatgccttcgtaagagacatccactgagccttcagcatcgtaaatggtgaaggtcactttcagcgaattgggatcgcgctgcacactacccggcatcaccatcccgccaacgcgcagacgctgaccgacttccggcatttgctgagtttcacgcttgccgtagagaatttcccccggcgtataaaagagatcgatattcgagcgcagcgcatatagcaccagaccgatagtcagcgccagccctgccaacacggcacaggcaatccacaagcggtttttacggcgaatattcatgcagcctcctgctgttgcgcagcacgtaaacgcgcctcacgcgcccgctgttgcgccacgccacgcagaattgcgcgatgttgcatcaccgagtgcacgaccaaaaccaccagcggaataacggtcatcaccaccgccagccagacaaaaaaggcgtaaccgcccattgcgaaaaattcattccaggaagcaaatgcaggggtcatttacggcctcttttcagtatcagttcactcacccacggacggcgtttttccatcagcaaaatcaaattacgcatccgcatcagcgtcagcgtggcagacaggagcaggaagccaaaaatcgaccagcgcagcggcgaacgcatcgccggatcgatactttgctgcatccgcgttgatccctgatgcagggtgttccaccactccacggagtaatgaataatcggcagattcaccacgccaatcagcaccaggatacctgccgcacggcccgccagacggcggtcgtcgaaggcgtgccacagggcaatcacacccacatacaaaaacagcagcaccagttcagaagtcagacgtgcatcccatacccaccaggtgccccacatcggttttccccatgcagagccggtaaccagggcaataaaggtaaacacggcaccaatgggggccatcgccgccaccgccaggttggccattttcatctgccagacaaggccaataaacgctgccactgccattgatgcataaatgcccatcgaccagatcgccgcaggcacatgcaggtagataatgcggtagctatttccctgctgataatcagccggagcaaagccgaatccccagatccagccgacggtaagcacgaccacactggcaattgccagccacggtataaaccagccacagatttgatacagccgtggtgggatcgccagttgatgcagtgttttccacatagtttcgataccagactcgaacaaaaatcagtaatccagcgttattgaatgctgattcgtaacgctgccgccgtcgcaaaaggacttaatgtcgcggtgcctgccagcaacgcgcctaaaattgccagatacccgtcaacgggcaaatgcatagaagccgcgtccatcgcggcggtggcaaagatgagtaatgggatagtcagcggtaacaccagtatgctgagcagcacaccaccgcgcttaagtcccactgtcagcgccacgcccggtgcaccgagaaagccaagcgtaggcgttcccagcagcagcgtcagcgccatcacttgccagccataaacatccattcccagtagcattgctaccagtggcgaaaggatgagtaacggcagaccggttaccatccagtgcgccatcaccttcgccagcacaacggcgggcaagggtaacggcaacaacatcaattgttcaagactgccgtcctgcaaatcgtcacggaacagtcgttccagcgccagcaaggatgaaagcagcgcagcaacccagataatgcccggtgcaatacgcgccagcagttgcggctccggaccgatactgagcggaaaaagggtaattacaatcaggaagaaccacagcgggttggcgatttcggcgctatggcgaaacgctacacgcagctcaagacggaaaatgcgccagaacatcatgcggccctcgtttgcgtcagtgaaatgcggcgaattttactttcagcaacgttgagcggctggtgggtagtcagaatcacaatccccccctgctccgtatgctgcgccatacgctgggtcagacgatcgacaccgttaacgtcaatcgcggtaaaaggctcgtcgaggatccataacgtggcacgggtcagccacagacgcgctaaagcgacgcggcgttgttgcccggccgagagctgatttacaggaatatcttcgaatccggcaagcccggcctgcgccagggcttccagacattgtgcggtatcgccatcgcgatgataaaagtgcagattttctaacgccgtcagccgggttttgatccccggctgatggcctatccataacaggttttgatggtagctgtcgcgtacctgatgcaagggctgcccttgccagagaacctcgcctgcgtcagggcgagacaaccccgtcagcaaacggagaagcgttgtcttccccgcgccgttgctaccggtgatttgtacccactctcctgcgttcagcgtaaatgacaagccactaaataaggttcgttcatcccgctcacaaagtaactctctggcttcaagcatacccacgcaataaccctgttaaaaacctggctcgacttcacgcatatcgggcagcttgtgcgctatccctttatggcaatcaatacaggtttgcccatctttcaccgcctggtcatgcatcttcgcggcaaccgatttctgggcggttgtatccatatactcgaagttgtgacagttacggcactcctgcgagttattgtccttcatgcgccgccactcattctgtgccatcgtcagacgatgagcttcaaatttctgcggcgtgtcaataacgccaaaaattttaccatacagctctttacttgctttgagcttgcgtatcatcttcggcacaaactcgtgcggaacgtgacaatccggacaggtcgcacggacgccgctacggttgttgtagtgcacggaatccatgtattcctgatacaccgtgttgcgcatttcgtggcagctaatgcagaactcttcggtattggctttttccatcccggtgttaaagccaccccagaagacgatgccgccaacaaaaccgatcaacagcagcgtccccagcgccagacggctgggggtacgccaccatttccacaggcgcttaatcagaccaggcttacggtcagaatttcccataataacctcttatttcccgtaaccttttgatggggtaaaggtattccccacgattggcgcggtatcggcctgcggtacgtgacattgcagacagaaataacgacgcggagccacttccgcgcccactttgccgtcgctgtccataaagtgagtaggactgatacgcggcgcgccagtggtgcgatagctttcgacaccgtggcactgcaagcagcggttggtattggtcgttacctgataaccttcaacgctatgcgggatcattggcggctgattcacatagttcagcggcatccgttcctgctcttttggcatccgaatggccccttcctgtgtcccggatacttccggcgactggctaaaatcgacgccattagccgcccaaaccgcgccgcttaccaccagggccagcatcgccgtccattgacacagcgctttcttcaggtcatggcttttcatgatttcgctcccgaactccatcgtgtagttattgtaaatacatcctcagaacagacatccacgcagcgaccgcacgtcatgcaatcgcggctggtgacctgcaccgggctttgttcatccagcaccggggcacgtagcacatgcggttccgggcaaacatgaaaacaatccatacagcggttacatttctgccgatcggtggccgcaacggtaatcacacctttgctacccagcacgccatacagcgcgccaaccggacaaatgtgcccgcaccagccgtgttcaacgaccagtagatcaaataaaaacagcgcgagaataagcagcgcgccgctgccgaagcccattaccaggctacgccccatcagagaaacggggttgatccattcccaaatgagcgtgccagttaaggccgatcccaccagaatgaccaccaacagcacgtagcgaatgtggcgagggatcgtcgcagactgattgaggtcaaagcgcctgcgtaaccagttcgctaagtcggtaatcgggttcagcgggcagacccagctgcaaaataatcgctttcccgccagggcgtagagcacggtgataatcaccgcaccggtcaacgccaccgtggcaggcagatgaccactggcaagactttgcagcgtcatcagcggatcggtcagcggaacggtgtcgaataacaggctactgctgtagttgccgtgcaagatccacacaccaaaccatggaccgctcaaaaacatccccagcacgaagaactgacaaaggcgacgtaacaccagccaacggtgactgcgccaccagccttttttctccagcgcctcgcgcccggcgtcacgtttacgatttgccattgttcccctccagccagccgaagcggtaatggtgacctaactcccctttcgccagtgacagcggtaacaccttgattgccggttgttccagcacgcatactttttcgcacttaccgcaaccggtacaggcgtcgctgtgaaccgtcggcagaaagcgggcgtgcttaccggtacgcgtgttgcgctccagctccagggtgatggcctcatcaattttcgggcattcgcgataacaaacatcgcagcgcagcccctgaaagttgagacagttttcctggtccaccagtaccgccagccccatccgcgcgtcgtcgatcgattcgatctcacgatccagcgcaccgctcgggcacactttggcgcacggaatgtcctcacacatttcgcaaggaatatcccgtgcgacaaaatatggcgtgcccgccgacagaccagaggccagcgtcgccagttttaaggtgtcgtaagggcaagcctgaacacactgaccgcaacgcacacaggcactggcaaaggcgttctcgtttatggctccgggcgggcgcaaccgcacgccagatgcgcgtgcggtttgctgttgtaaccccagcgccacacccacggcagccagcccgcctgctgtgcgaacaacatcgcgcagaaagcggcggcgaccattttgaggtttcgctgaccgggacataatggcttacaccttctccagtttgaccgcgcacttcttgaagtccgtctctttcgagagcggatcggtcgcatccagcgtcagtttgttaaccaactgtgcggcgtcgaagaacggcatgtacaccaggccctgtggcggacggttacgaccgcgcgtttcaacaatcgagatcacttcgccacggcgagaaaccactttcactttgtcgccacggcgcagatcgcgcgctttcgcatccagcgggtgaataaacaggaccgcttccgggaaggcgcggtgcagttctggtacacggcgagtcatactgccggtgtgccagtgctccagaacgcgtccggtagagagccacaggtcgtactcttcatccggtgcttccgccgccggttcgaatggcagtgcgaagatcaccgctttgccatccggtttaccgtagaacttatagccttcgcccgctttcacgtacgggtcgttaccttcgctgtaacgccactgcgtttctttaccgttcaccaccggccagcgcagaccgcgcgctttgtggtagtcatcgaacggtgccagatcgtgaccgtgaccgcgaccaaaccatgcgtactcttcgaacagccctttttgcagatagaagcccagctcgcgggattcatcgttcagctgatcttccgccagttcggataccgggaatttgctcacttccggtgtggcatacagcacttcgtacagcgttttgccacgcagttccggtttcttcgccagcagatcttccggccatacttcttcagttttgaagcggcgggagaactggactaactgccagagatccgatttcgcttcgcccggtgcctgtacctgttgacgccagaactgagtacggcgttcggcgttaccgtaagcgccctctttctctacccacattgcggtcggcaggatcaagtcggcggccagcgcactgactgtcggatacggatcggagacgatgatgaagttgcgcggatcgcgccagcccggcatacgctcttcattgatgttcggcccggcctgcatgttgttggtacacatggtccagtaaacattcagtttgccgtctttcagcgcacggtcttgtgccaccgcgtgcagaccgattttcgccggaatggtgccgctcgggatattccacttcttctcgcagatatcacggtgtttctcgttggtcaccaccatgtccgcaggcagacggtgagcaaaggtgcccacttcacgcgcagtaccacacgcagaaggttgcccggtcagggagaacggaccgcaacccggctgggaaattttgccggtcagcaggtgcaggttgtagaccaggttgttagcccacacgccacgagtatgctggttgaagcccatcgtccagtaggagatgactttcttgttcggatcggcatacagctgcgccagttgttctaactggtctttcggcacgccggtcatttcggcagttttttccagcgtatactcggcaacgaaggctttgtaatcttcaaagctcatcggttcggaggcgtcagaacccggattcttcgctgctttttccagcggatgggtcggacgtaaaccgtagccgatgtccgtcgcccctttgcgcaggttaacgtgcttgctgaagaagtcctgatttatcgcattgttttgaatgatatagttggcgatgtagttcaggatcaccaggtcagattgcggcgtaaagatgatgccgttatccgccagctcgaagctacgatgctggtaggtagaaagcaccgccacggtgacgttctggttagagagacgacggttagtgatgcgcgaccagaggatcgggtgcatttccgccatgtttgcgccccacagcacaaacgcgtcagcctgctcgatgtcgtcatagcagcccatcggctcatccataccaaaggtacgcataaagccaactactgccgacgccatacagtgacgcgcgttcgggtcgatgttgttcgaacggaagcccgctttaaacagcttggacgcggcataaccttcccagatagtccactgaccagaaccgaacataccgatcgattccggccctttttctttcagggcggttttgaatttctcttccatcacatcgaaggcctgatcccaggtgattggggtaaattcgccttctttgtcatatttaccgtttttcatacgcagcagcggctgcgtcaaacggtctttaccgtacatgattttgggcaggaaatagcccttaatgcagttcaggccacggttaaccggtgcgtccgggtcgccctgacaggccaccacacgtccctgctgcgttccgaccagaacgccgcaaccagtaccgcagaaacggcacggcgctttatcccatttgatggcttcctgctgaccaacaacggcgcgggcaacgcccggcacgctgagaccggcagccgccgcagcggccgcaacggcgttagctttcataaagctacgacgactgagtttcatggtgtttcctcaccttgctcttcctgctggtgataaaccagcgacaccgccagcacgccctctacgttgcgtactgactcaatggtttggatcagcgtttcgctgtcttctgcttccaccaccacaatcaactgaccgctcggcgcgtcgctgacagcaacttcacagccgggaaaggcgttcagttgggtgctgatgtctgaaattcgttcgcttttggcctgcacgaccaggctgcaaacttgccagttagtgtgcatggagatactccgcagttatggctgataccggacagctggctgcacatgctccacatccgttgcaaagttggctattaagttgcggctggtagatcccggagagcgtcgggcgaaagataattgccattggctcacagctatcctgacagcggcggcattcaactgactgatacgccaggcacgcgtccccgatggtgaactgcaaatcccaggccctggtgtggcgcggagaaaatagcgattcggggcaagcctgcgcgcagtcgtaacagaagctgcactcgttatttttgaaattaacgctcggatagccgcccgcgccgcgttgcagaatgttgttttcacaagcattaatacaggcgtcgcagcgggtgcaatgggtcagaaaatgagattcatcaccggaccagggcggacggataccgttactggctttgcgccagcgaccagtgagtatgccccgacgggatgcatcaatcttcacattgaccttccatcattaacgcgctctgaaaattgagagcgaccaaataaaccgcataattaataagccatttttatagccgctaagatattaaaggatgtgtcaaagatgcataccccgatcggggtaaaacctgtagcaggatcaaaagagtggcgggaagcgtggcaaaaacgggcttttgctcacatttcaaatggttataaatatatttatatagcgattaattcaccagagatatttctgctggtttgctctctcattagaatttaacactaaaagagcaggtaaaattatctgaatgttctttaagttattcataaagcaaattaataaatctgatgaatatgttaaccttcagcgacatcatcggtgaaaacctataaatgaagaaggaaagcaaaaaaatgaagaccattctacctgcagtattgtttgccgctttcgctaccacttccgcctgggcggcagaaagcgtccagccactggaaaaaatcgcgccttatccacaagctgaaaaagggatgaagcgtcaggtgattcagttaaccccgcaagaagatgaatctaccctgaaagtagaactgttaatcggtcagacgctggaagtcgattgcaatttgcatcgtctcggcgggaagctggaaaacaaaacgctggaaggctggggctatgattattatgtctttgataaagtcagttccccggtttcgacgatgatggcctgcccagatggcaagaaagagaagaaatttgtcaccgcgtatctgggcgatgctggaatgctgcgttacaacagcaagctgccgatcgtggtgtatacgccagacaatgtagatgtgaagtaccgcgtctggaaggcggaagagaaaattgacaacgcggtagttcgctaaactgccgtgaagtgcggcaccccgtaggtcagacaaggcggtcacgccgcatccgacatccaacgcccgagccggttgcctgatgcgacgctggcgcgtcttatcaggcctacaccgctgtgaagtgctccaccccgtaggtcggataaggcggttacgccgcatccgacatctaacgcccaagccggttgcctgatgcgacgctggcgcgtcttatcaggcctacaccgctgtgaagtgctccaccccgtaggttggataaggcggttacgccgcatccgacatccaacgtccgagccggttgcctgatgcgacgctggcgcgtcttatcaggcctacaccgctgtcgaagtgctccacccgtagattggataaggcggttacgccgcatccgacatctaacgcccgagccggtttgcctgataagacgctggcgcgtcttatcagcatacgccacatccccggcataccatgccggatgtggcacatcattacaacgcaatatccgccacttctttttgaacgggtttcggtttcaactgcggtttcggcgtactatctgctgcctgcggcttgtcgtatttcagccccagcacttcgctggtgtactgcaactcgcgttctgttgccgctacatcaccgttcagcttgcgtccataagacggaacgatcgctttcaacgtagcctgccattgcgggctggaaacgcgatcgccaaatactttttccagcagatccaacataatcggcgcggcggttgacgcccctggcgatgcccccaggagcgcggcaatggtcccttgctggtcactgacgacttcagtacccagacgcagtacgccacctttctcggcatcacgcttgataatctgcacgcgctgccccgcttgccacaaacgccagtcctcttttttcgcctgcggatagtactctttcaacgcttcaaaacgatcctcttcactcaacatcacctgactcaccagatatttcaccagatcgaaattatccagcccgacgtgcatcatcggcatcacgttagaggtggtggtggaactcatcagatcccacaatgaaccgtttttgaggaatttggttgagaaggtggcaaatggcccaaacagcactacgcgtttaccgtccagaacgcgggtatcgatatgcggaaccgacatcggtggtgcgccaacggatgctttaccgtaaaccttcgccagatggtgattaaccacgtccaggttttccgaaacaaggaactgtccgcccaccgggaaaccggcgtagtctttcgcttccggaatccccgattcctgtaacagcttcagcgccgcaccgcccgcgccgataaagacaaatttggcacgaatgttctgtgcagtgccatttttcagatcggcaacggtaacggtccaggtgttatcgtcattacgctttagggcgcggacttcgctgctgagttgcagcgagaagttagatttcttctgcaaggaagcaattaactggcgggtgatctcgccgtagttcacatcggtaccaatttccgtacgcgtggctgccactttctgttgcggatcgcgcccttccatcactaacggtgcccactctttgatctgcgcgtgatcttcagagtaacgcataccgcgaaacagcgagctttgttgcaacgcggcgtaacgggcgcgcaggaaattaacgttatcctcgccccagacaaagctcatatgcggaacggtattgataaatgaacgcggagtacgcagcacgccgcgctcaacctggtgcgcccagaactggcgggaaatctgaaatgcttcgttaatggcgactgctttttcaatactgatgctgccatcggcgttttgcggggtgtagttcagttccatcagtgcagaatgcccggttccggcgttattccagccgttcgaactctcctgcgcgacaccctccaggcgctccaccatggtcatcgaccattcaggctccagctcgcgtaaataggtccccaacgtggcgctcataatgccgccgccaatcaacagtacatcagtttcctgctcctcagacgctttcgcttttgccgccatcgaaacggcattaagccccacggccatcgagaagagcatggcagtcacttttttcatcttgttaatgccttacttttagtcgctttattgcaggtgagatttgcgcggcatcaacggtaacacttaagtaacaacatttaaataatgtttataaattatattctaattttagaaacattataatttcgttgattaactatagggttattagaaatgaagggatttttagcatattgacctgacggcagcagtccgccaggtcagcgtcgtaatattatgccgtccgggcaacggcatcacgcgaagcggcatcgcgctcttcgcccgtcagctcgctaagttgcccattgcgcatttccagcaggcggtcggcgtggataaagtaatgatcatcatgactgatagcgaaaatagttttacccatctcctgcatcagcggcagcaacacctgataaaactcacgacggaagtgtggatcctgatccgccgcccattcatccagcaggataatatcgcgttcttctgccagcgccagcaacagcgccacgcgttttttctgcccttttgataacttcaggttaacaatacgcccgttgcttaactcaagcttatgagccattttcagctgcgccagccacttctcaaccagttgcgggttagcgggtttaccctccggccccagcagttgatcaaacagccagacatcggtaaacactgccgaaaacagtttgcgataatcttccggttgttcgccactgacaggtttgccatccagcaagatttcgccgctttgtggctggtacaagcccgtcagcaacatcgccagcgtcgattttccactaccgttgccaccaatcagaaacagcagctcgccacgtttaatggtgaggttaatcggcccaacggaaaacgcgttatcctgatagctaaacgtcacgttacgcagctccagcgtttgccagttgggaaacgcctgcgggcgcggaaactcagctttgaaaggcgcgagcgcgaatttgttcagcttgttaaacgccacctgcgccgtcagcagcgtcggcaatgcgccaaccgccgaaagcagcggcgtacgcaggaataacagcgtcaacgaataggtcgcagcaacgttggtatcagcccaaccgagactgttcgccatccagaacaccaggccgatagcgcccagcatcatgatgtttgaccagttcacggcgctaagatggaaggtgtctgcgcgaataatatgatggcgatactcttgcgcatcggggatgtagaggttgttaaacacatactcggcgcgttcccggttcagagtcagctctttgcgcccttcgagtacggtttgaaaatccgtgtacagcttgtcttcggtttcacgcagggtcgccatatgtttgtacacccgcgccaccagtacaaaaccaccccagatggtgatcgccatccagatagccgttaccagcaacattttgcccgacagcatccacagatacgccgcggaaccgatagtgagaatgatcccctgcaccagttccggaagacgcacaaaagcaatggtgatattgcgcacatcgctggttaatcccgccagcaacgaggcgctaccgagttgttcaatgcgctcgacgtgggtatccagaatccgcttgataaattcactacgcagtcggtaaacgaagtgatgccccaaagtggtgagcgccagttgcgatccgagagtgactgccatcaacagcagtaataatccaagaaactccggcaacaccagcagactggtatccgccgtttcgataaggcgctgattgataaaagcaattaagccaatgcctaatgccgcactggcgaggcttagcgccatcacactgataaatggccagcgatactgccgccagacaagtacaagaagttccatgcagaaaacccggacaatgaattacagcccgcagtttaaacatcttcgcgcgcacagcaataataattcttatttttattcttttttacctgcctgacggaatgtcaggttgtagcggcagtcggtggtgagtggatgaaaccccgctttcaacggttgaataccgtgataaaacagccgcgattcaccgccccataccaccacatcgccatgttccaacaacaaacgtttgagcggatcattacgtttcaggccgccaaattgaaaaatcgcgggtaagcccagagaaacagaaacaattggcgcgcgcagatccggttcgtctttatcctgatgcagcgacagtttcgcgccaggagcgtagcggttgataagacaagcatctggctggaaatctggatagcccgccgccgtagccgcacgttgacataaattatgaaaactctgtggcatggcgggccacggtttatttgtttgcggatcaatgggcgaatagagataaccttgccgatggctcgtccagcccagatgcccacagttggtcatcgccaccgacatggtatatcccccgggggtgaccatctggcgaaacggcgactggctggcaacgtcattaatatcgcggattagttgctccgcagcgttaaaagcaaaacgccgtaaaattaccgctccagccgccagtggctcttgccacggttcaccatcggcaaacagatccaacattacctctcctcattttcagcttcgcggcgcagcagttgcgctttacgcgacacgccccagcggtaacctgaaagcgatccatcaccgcgtactacccgatgacagggtataacgatagccagcttgttggcggcacaggcacttgcaacggcccgtaccgctttcggtttgccgatggcgttagccagttgctgataactgacggtttcaccgcaaggtatcgtgcgcagtgcctgccagacttgttgctgaaaagcagtgccgcgaatgtccagcggtaacgtcagcggcgtatcgcgttgattgaggctggcgatcacttcacgcacatgttgctgaaacatcagatcggcaggcgcgttgtcggcagcgggaaacatttgttgcaactcgctgattaatgtggcgtcatcatcgcccagcaatatcgcgcaaatcccccgctcgctttctgccaccaggcaacgacccagctcacaatcagccagcgcgtaacgcaccgccagattttcgccaccgtgacggaattgtttagccgtcatgcccagcgtttcatcggctttgcggtagtaactgctgctgtcggggaatccggcgttaagaatagacgtcgtcacgctctcccctttcgccagcgattcgcgcaaacggcgagcgcgccaggcctgttgccaggctttaggcgtcattccggtagtcgctttaaacaaccgatgtagatgaaatggactcatcgccacctggtcggctaaggcttccagcgttacaggcgtttcctgttccagcagtcgacacgcgtgggtgattttatccaaccgatgttgccggggattggctttgtctggctgacaacgtttgcaggggcgaaagccagcggcgagtgcctcactggcatttgcgtagaaggagacgttttcccgcaaagcatgtctggcgcggcaagacggacggcaaaagatgcctgtggtacgcacggcgaaaacgaattcgccgtcggcattcgggtcgcgggctaagacagattgccagcgttgatcgtcagttaagcatgtggcttttttcataatcagctccctggttaaggatagcctttagtctgcccggtcaccatcacgcaaaaaccaacaatcttgcgctttaatttttttcgctgacaaggaagcttttaaactgtggtgacatccaggttttaaagctatcgccttctttggtgatcatataaaccgccagcccttcccggcgaacaacctctttggctttctccggcccgagtaccatcaagccagtatcccaggcatcggcttccagcgccgtcggagcaatcaccgtcacggataccagattgtgttcgatgggacgcccggtttgcggatcgataacatgggaaagacgtttgccgtccagttcgtaatagttacggtagctgccagaggtgctaatcccatgaccgttgatatccaccacagcctgaaccgcgttttctttatcggttggtttttgaatcgctacccgccacggctggccttcaccgttcataccacggctgttcagcgcgccgcccaccgacaccagatagcgggaaatcccttcctgctccatcaagcgtgccaggtgatccgccgcataaccttcaccgacggtggagagatcgacatataaatccggcaggtctttttgcagatattgctgatgcgactgattaatgaccgtcaggtgctgtaagccggttttggctttcatcgcatcaatctgttcctggctcgggatttgtaccggctgttgttccgggccaaaaccccacagattcaccagtggcccgacggttatatccatcgcaccatcggtccttgcgccaatgcgcagcgaggtggtgacgatatcggccatcgcttcacttaccggccacggcgacaaactttgcgagtcgttaaagcgcatcagcgcggaatcttttttataggtcgaaagcagctgatcgtcggcgtccagctgggtctgaatcttttctttaagttcggcactgcgtttggcatcaatgcccgggatgctggcacgccagaaggtacccatggttttgccttcaagaacggtaacttcagtagcgtgggttttggcgggttgtggtttttgatcgcaaccaacaaagaagagcgcggcagccagcagtgccacgcgggtaaagcttatttccatacgtgattatcctcatgcgaacggtcgcaagagtacaccaaaaaactgtgtttgtacgctgaaaacaatgaaaaaagggcccgcaggccctttgttcgatatcaatcgagattagaactggtaaaccagacccagagctacgatgttatcagtgttgatgccagcgtcacgagtgaactggttgtcgtccagcaggttgattttgtagtcaacgtaggtggacatgtttttgttgaagtagtaggtcgcaccaacatcaacatatttcaggatatcttcgtcgtcgtagttacgaccattgatgacacccaggtttttacctttagactgcaggtaagccagggacggacgcagaccaaagtcgaactggtactgagcaacagcttcgaagttctgtgctttgttcgcccaacccagggaacctacgcgagttgcgttgtaggtctgggtgtactgagcagccaggtagatgttgttagcgtcgtatttcagaccaccagtgtaggtttcagcacggtcgccagtaccgatgtagttacgagctacaccattgctggtgtagctaccattttgatcatcagtacgtttggagctggaaactgcagcaccgataccgaagccttcgtaatcataagtgatagatccgccgacaccgtcgccattctgacgcagagcaacacgaccattgttggtcatgccttcgccgcttacgctaccgtttttgccctggtactgaacagcaaagttcagaccgtcaatcagaccgaagaagtcggtgttacggtaggtcgcgaagccgttaccacgctgctgcatgaagttgtcagaaccgtaggtgtcgccaccgaattctggcagtacgtcggtccaggaagttacatcgtaaacaacgccgtagttacgaccgtagtcgaaagaacctacatcctggaatttcagacctgcgaatgccacacgggtccaggagttttctttgttgtcttcagaggtattgccctggatctgatattcccactggccgtaaccggtcagctggtcagtaacctgagtttcgcctttgaaaccaagacgtacataggtctggtcgccgtcttctgacttgttgtcagagaaatagtgcaggccgtctactttaccgtacagatctaatttgttgccgtctttgttgtaaacttcagcagcgtttgctgcgcctgctaccagcagagctgggaccaggagggacagtactttaactttcatgttattaaccctctgttatatgcctttatttgcttttttatgccactgcatactgattaaccctcattaatcagtcggcaagtccattctccccaaaaatgcagaataatccaacacgaatatgatactaaaacttttaagatgtttcatttatcgctatagatgtttcaaaatgtaaatgcaagggaactttttaagattattgcggaatggcgaaataagcacctaacatcaagcaataataattcaaggttaaaatcaataacttattcttaagtatttgacagcactgaatgtcaaaacaaaaccttcactcgcaactagaataactcccgctatcatcattaactttatttattaccgtcattcatttctgaatgtctgtttacccctatttcaaccggatgcctcgcattcggttttttttacccttctttacacacttttcattattctgtgctaccacataaaaactataacgcttgttaactatttcacaaataattaacatcagcataatttccagcaatctttgtttatttgcaattattttcgttgggctttttgtaggttatttgtacagcaaaatggcgcttgtacatctatttcccccaatgcaggatgataaatatcacgggagaatagagaatcatcaatcaggtaagagtctggaatttcacactgtaccctttatactgccctatcacttcgcgaagttttaacaggtcataaacacgaatgcgtcagaaagagacaacggccacgacccgcttttcactcctaccggggagcattacccgcttctttttactgttgatcattgtgttactggtgacgatgggtgtaatggtacaaagcgccgttaacgcctggctgaaagataaaagttaccagattgtcgacattacccatgctatccaaaagcgcgtcgataactggcgttacgtgacctggcagatctacgacaacattgccgcgacgacctccccctcctccggcgaaggtttacaagagacgcgcctgaaacaggatgtctactatctggagaaaccacgccgcaaaacggaagcgttaatctttggctctcacgacaactcaacgcttgagatgactcagcggatgtccacttatctggatacattgtggggcgcagaaaatgtaccgtggtcgatgtattacctgaatggtcaggataacagtctggtgctgatctcaaccctaccccttaaagatctcacctccggatttaaagaatcgaccgtcagcgacattgttgattcacgtcgtgcagagatgttgcaacaggccaacgccctcgatgaacgcgaaagcttttctaacatgcgccgcctggcctggcagaacggtcattactttacattgcgtactacctttaaccagccaggacatctggcaacggtcgtggcttttgatctgccgattaatgatttgatcccaccgggtatgccgctggacagtttccgccttgagccagacgcgacggcaacgggaaacaatgataatgagaaagaagggacggatagcgtcagtatccactttaacagtacgaagattgaaatctcctcggcactcaactctaccgatatgcgcctggtctggcaggttccttatggcaccttattgctggatacgttgcaaaacattctgctgccactgctgctgaacatcggtttgctggcgctggcgttatttggctataccacattccgccatttctccagccgcagtacagaaaacgtccccagcacggcggtcaataacgaattgcgcattttacgggcaatcaatgaagagatagtctcactgctgccgctcggcctgctggttcacgatcaggaatcgaaccgcactgtcataagtaacaaaattgccgatcatttgctgccgcatttgaatctgcaaaacatcaccaccatggcggaacagcatcaggggattattcaggcgacgatcaataacgagctgtatgagatccgcatgttccgcagccaggtcgcgccgcgcacacaaattttcattattcgcgatcaggatcgcgaagtgctggtaaacaagaaactcaagcaggcgcagcgtctgtatgagaaaaaccagcaggggcggatgatctttatgaaaaacattggcgatgcgctgaaagaacccgcacagtccctggcggagagcgcggctaaactcaacgccccggaaagcaaacaactggcgaatcaggcagatgtgctggtgcggctggttgatgaaatacagttagcgaacatgcttgcggatgatagctggaaaagtgagacggtgctgttctccgtgcaggatttaattgatgaagttgtgccttcagtgttgcctgccatcaagcgtaaaggtctgcaactgctgattaacaatcatctgaaagcacacgatatgcgccgcggcgatcgcgatgccttacgacgtattttgctgctactgatgcaatatgccgtgacctcaacgcaattgggaaaaatcacccttgaggttgatcaggatgagtcctccgaagaccgcctgacgttccgcattctggacacgggagaaggcgtaagtattcatgaaatggataatttgcacttcccgtttatcaaccagacccaaaacgatcgctatggcaaggcggacccgctggcattctggctgagcgatcaactggcacgtaaactgggcggtcatttaaacatcaaaacgcgggatgggcttggtacacgctactctgtgcatatcaaaatgctcgcagctgacccggaagttgaagaggaagaagagcgtttactggatgatgtctgcgtaatggtggatgttacttcggcagaaattcggaatattgtcactcgccagttagaaaattggggtgcaacctgtatcacacccgatgaaagattaattagtcaagattatgatatctttttaacggataatccgtctaatcttactgcctctggcttgcttttaagcgatgatgagtctggcgtacgggaaattgggcctggtcaattgtgcgtcaacttcaatatgagcaacgctatgcaggaagcggtcttacaattaattgaagtgcaactggcgcaggaagaggtgacagaatcgcctctgggcggagatgaaaatgcgcaactccatgccagcggctattatgcgctctttgtagacacagtaccggatgatgttaagaggctgtatactgaagcagcaaccagtgactttgctgcgttagcccaaacggctcatcgtcttaaaggcgtatttgccatgctaaatctggtacccggcaagcagttatgtgaaacgctggaacatctgattcgtgagaaggatgttccaggaatagaaaaatacatcagcgacattgacagttatgtcaagagcttgctgtagcaaggtagcctattacatgaacaatatgaacgtaattattgccgatgaccatccgatagtcttgttcggtattcgcaaatcacttgagcaaattgagtgggtgaatgttgtcggcgaatttgaagactctacagcactgatcaacaacctgccgaaactggatgcgcatgtgttgattaccgatctctccatgcctggcgataagtacggcgatggcattaccttaatcaagtacatcaagcgccatttcccaagcctgtcgatcattgttctgactatgaacaacaacccggcgattcttagtgcggtattggatctggatatcgaagggatcgtgctgaaacaaggtgcaccgaccgatctgccgaaagctctcgccgcgctgcagaaagggaagaaatttaccccggaaagcgtttctcgcctgttggaaaaaatcagtgctggtggttacggtgacaagcgtctctcgccaaaagagagtgaagttctgcgcctgtttgcggaaggcttcctggtgaccgagatcgctaaaaagctgaaccgcagtattaaaaccatcagtagccagaagaaatctgcgatgatgaagctgggtgtcgagaacgatatcgccctgctgaattatctctcttcagtgaccttaagtccggcagataaagactaatcacctgtaggccagataagacgcgttagtgtcttatctggcatttgcaccgattgccggatgcggcgtaaacgccttatccggcctacgattcccattatttcaacaaattacattaaagtaggccagataagacgcgtcagcgtcgcatctggcatttgcactgaatgccggatgcggcgtaaacgccttatccgtcctacgaatcccgcgatttcctgaccctctcggcatataacgtcagcgtctgttttatcacatccagcgttaccggcttcgacaggcagctgtccataccggactccagacaccgctgcttctcttcagccaacgcattagcagttactccgattaccggcaacgtcagtcccaactgacgaatgcgttgcgtcaagcggtaaccatccatatttggcatgttgacgtcgctaagcacgatatcaatatgattcttgctaagtacattaagcgcatcgacgccatcattcgcggttttacattgatagcccaacgatcccaactgatctgccagcaaacgccggttaatcggatgatcatccacgaccagaatcatcatatcgtcattatcgctgaccgctttgtccgttgacggcagagcgttagcaggatcgtcgctctccatctcgatcaaataaatacgcgccaacaatgccggtagctcatgcggagcagccacactgtgtacccactcccctggcgctttctccagcggaataccaatatggcgacgacagaaggtcactaccgctctgccctgccattttttactcactacctcgtcagtgatcaacacatcttcgggagtcggttcctgcccttcgtatgttgtaacgacgatgccgctgcgctgcaaactggtttccaggaactgacagagcgacgcattgcggaccgccagccagcagcgtttaccactcaacccttccacgccttttttctgcgggtactgagcgccgtacaacggaatacgcacggtaaactggctgcccattcccggttctgaatctaccgagatatcgccgtccatcatgctgatcagtttttcacaaatcgccagacccagaccggtcccctggaaattacgctgtacgcccgttccgacctggaagaagggatcaaacaagcgcaccacttctttcgccggtatccccacgccggtatcgcgaacacggatagagagataatcgccatccgcgcgaacatgcaaaactatacagccggtatcggtgaattttatggcgttactcaacaggttggagatgacctgctgtaaacgcatcgggtcgccatttaaggccactggcacatccggttcaataaagcagtacaagcctaactgcttgcgtaccaccagcggtaaatagttggcggtgatgtggttcatcacttcacgcggtgaaaactcacgcggttcgatcttcaactgttccgattcaatcttcgagaaatcgagaatatcgctgataattttcaacaacaggctggaagagttgttcattgccgtcaccagccgatcgacgcctttcggtaactctttggtttgcaacagatccaggttaccgataatgccatacagcggcgttcgcagctcatgactgacggtggcaaggaacatcgattttgactggctcgcctgttccgctgcttgtgccatctcctgcaacgactcttccatcttcacgcgcgaagaaacatccaccagcacacaaatggccacgttttcattacgatagcgcgaatggacgaagctgatttgcagattggtattgttgctggtcaggacatcaacaaaattgacctgctgcccacagataatttgcgtcagtcgttggcggtcctcatgcgtaagcatattgagataggtatgcgccagttcgttacttaaaatattgacgccatcagcggtacgcaaaatgcagatacccactggcgcggaggcgacaatcttgcgattgaactgctcatgttcttccagtcgtagggcgtcgctttccgccggaatgaaaatacgtcgctcgtacatccgtgcgagagtaaacaatgcagctccggcaagcacattcagcaaaattgcgttaaggatcaacatgcgaatgcgttccagcaccttatcaaccggcaccgaatacacgatgcttagcgatgagggtggcagatttttcttcagcaccagctcccggaacccttccgtatagccaaaccaggagcgttcctgcatccagcgaggatcgcccttaattttactttctggtccggtaagcgaaatcagggtatgaccattttcatcaagaatggtaacccccatcggcaacgtacccggtaagaaaaagttttccatccggatggtctgctcgacacccaaaagcgcctgcaaccggttcgccagataaactggcgtcaacgcgtaaaaatacccgacgccagggcgcggaccttcgctgatccagtagaggttactgccgctatcatcttgtggtgcatttcgatatttattgatgcgttcatgcaaagctttcaacgcggtatcgcgttccactggcatatcacgcagaccgaaattggccatgcagaggttatcactgccgattaaaaatacccggttgagatcgtaagccgcagaaaaattatcgcgccagtagcgcataaaccacgccaatgactccagagaacctcgccaggtgttactcatcgcggaacaatcggagtcggcaaacagcggttcaaacgcaggcacatccgcctgcgtttctcgtccacgcggggaaagcacaccgttctctgccgataagcgattttcggcgatgtacttcagctctttcatcacatcagaggtgcgttgaataaagcgctgagcctgatcggaactcagattaaattcctgacgaatttccgattctcgctgatgtaacgcattaacgatgtaaaaaacggatgaaaaagcaatcaacagccagagcactaacgccaatgctctgaacatgtagcgcgaggctttcagggttgtacgaaaagaagcaaggtatttcaaaggggcgaagctccgcctcaggtgaccgatggagtgtggttaaggtagcggtaaaagcgtgttaccgcaatgttctctcttctctggaatatgatacaccgccgagaaatcatcaccttaacctctgataatcgtcatataccggacaagactagtggatttcagcatgcattatatgaagtggatttatccacgccgcttacgcaatcaaatgatcctgatggcaatcctgatggtcattgtcccaacgcttactattggttatatcgtagaaacggaaggacgttcagcagtcttatctgaaaaagagaaaaaactttctgccgtggtcaacctgcttaatcaggcgctaggcaatcgctacgatctctacatcgacttaccgcgtgaggagcgtatccgcgcattaaatgcagaacttgcccccattaccgaaaatatcactcacgccttccctggcatcggcgctggttattacaacaaaacgctggatgcgataatcacctacgcgccttcagcgctatatcagaataatgtcggcgttaccattgccgcagatcaccctggtcgcgaagtcatgcgtacaaatacccctttggtttattcaggcaggcaggtgcgcggcgatattttgaattcaatgatccccattgagcgtaatggtgaaatcctcggctatatctgggccaatgaattaaccgaagatattcgccgccaggcctggaaaatggatgtgaggattatcattgtgctcaccgccggtttgctgataagcctgctgttgattgtccttttctcccgtcgcctgagcgccaatattgatatcatcaccgatggcctctcgactctggcacaaaatattcccactcgattaccacaattgcccggtgaaatggggcaaatcagtcagagtgttaataacctcgcccaggcactgcgtgaaacgcggacacttaacgatctgattattgaaaacgctgccgatggcgtcattgccattgaccgccagggtgatgtaaccaccatgaacccggcagcagaagttatcactggctatcaacgccatgaactggtagggcagccttactccatgttgttcgacaatactcagttctacagtccagtactggatacgctggaacatggcaccgaacatgtggcgctggagatcagttttccaggtcgtgaccgcaccattgaactcagtgtcactaccagtcgtattcataacacgcacggtgaaatgataggtgctttggtgattttctctgatttaactgcccgcaaagaaacccagcgccgcatggcgcaagcagaacgcctcgccacactgggtgagctgatggctggcgtcgcgcatgaagtacgtaatccgttaacggctattcgtggttatgtacagatcttgcgccaacaaaccagtgacccaatacatcaggaatatctgtccgtagtactcaaagaaatcgattcaattaacaaagttattcagcaattgctcgaattttcacgtccacgccacagtcaatggcaacaagtcagcctcaatgcattggttgaagaaactctggtactggtacaaaccgccggcgtacaagcgcgggtcgacttcataagcgaactggataatgaattaagcccgattaacgccgatcgtgaactgctcaaacaggtactactgaatatcctgatcaatgccgtccaggctatcagcgcacgagggaaaattcgcattcaaacctggcaatacagcgactcacaacaggccatttcgatagaggacaacggctgtggcattgatctctcgctgcaaaaaaagatcttcgatccctttttcaccaccaaagcctcaggaaccgggcttggtctggcgttaagtcaacgcatcattaatgcccatcagggtgatattcgcgtcgccagtttgccgggctacggcgcaaccttcacgcttattttaccgatcaacccgcagggaaatcagactgtatgactgctattaatcgcatccttattgtggatgatgaagataatgttcgccgtatgctgagcaccgcttttgcactacaaggattcgaaacacattgtgcgaacaacggacgcacagcattacacctgtttgccgatattcaccctgatgtggtgttgatggatatccgcatgccagagatggacggcatcaaggcactaaaggagatgcgcagccatgagacccggacacccgttattctgatgacggcctatgcggaagtggaaaccgccgtcgaagcgctacgctgcggagccttcgactatgttattaaaccgtttgatctcgatgagttgaatttaatcgttcagcgcgctttacaactccagtcaatgaaaaaagagatccgtcatctgcaccaggcactgagcaccagctggcaatgggggcacattctcaccaacagcccggcgatgatggacatctgcaaagacaccgccaaaattgccctttctcaggccagcgtcttgattagcggtgaaagcggcaccgggaaagagttgattgccagagcgattcactacaattcgcggcgggtaaaggggccgttcattaaagtcaactgcgcggcgctgccggaatcgttgctcgaaagtgaactgtttggtcatgaaaaaggtgcatttactggtgcacaaaccttgcgtcagggattatttgaacgagccaacgaaggtactctgctcctcgacgaaattggcgaaatgccgctggtactacaagccaaattactacgcattctacaggaacgggaatttgaacggattggcggccatcagaccataaaagttgatatccgcatcattgctgccaccaaccgcgacttgcaggcaatggtaaaagaaggcaccttccgtgaagatctcttttatcgccttaacgttattcatttaatactgccgcctctgcgcgatcgccgggaagatatttccctgttagctaatcactttttgcaaaaattcagtagtgagaatcagcgcgatattatcgacatcgatccgatggcaatgtcactgcttaccgcctggtcatggccgggaaatattcgagagctttccaacgttattgaacgcgccgtcgtgatgaattcaggcccgatcattttttctgaggatcttccgccacagattcgtcagccagtctgtaatgctggcgaggtaaaaacagcccctgtcggtgagcgtaatttaaaagaggaaattaaacgcgtcgaaaaacgcatcattatggaagtgctggaacaacaagaaggaaaccgaacccgcactgctttaatgctgggcatcagtcgccgtgcattgatgtataaactccaggaatacggtatcgatccggcggatgtataacaccaaaacttgctatgcagaaatttgcacagtgcgcaattttctgcatagccgctcattctccttataaacccccatccaatttatcccttcatattcaattagttaaataactaaatccaataatctcattctggcactccccttgctattgcctgactgtacccacaacggtgtatgcaagagggataaaaaatgaaaacaaaattgatgacattacaagacgccaccggcttctttcgtgacggcatgaccatcatggtgggcggatttatggggattggcactccatcccgcctggttgaagcattactggaatctggtgttcgcgacctgacattgatagccaatgataccgcgtttgttgataccggcatcggtccgctcatcgtcaatggtcgagtccgcaaagtgattgcttcacatatcggcaccaacccggaaacaggtcggcgcatgatatctggtgagatggacgtcgttctggtgccgcaaggtacgctaatcgagcaaattcgctgtggtggagctggacttggtggttttctcaccccaacgggtgtcggcaccgtcgtagaggaaggcaaacagacactgacactcgacggtaaaacctggctgctcgaacgcccactgcgcgccgacctggcgctaattcgcgctcatcgttgcgacacacttggcaacctgacctatcaacttagcgcccgcaactttaaccccctgatagcccttgcagctgatatcacgctggtagagccagatgaactggtcgaaaccggcgagctgcaacctgaccatattgtcacccctggtgccgttatcgaccacatcatcgtttcacaggagagcaaataatggatgcgaaacaacgtattgcgcgccgtgtggcgcaagagcttcgtgatggtgacatcgttaacttagggatcggtttacccacaatggtcgccaattatttaccggagggtattcatatcactctgcaatcggaaaacggcttcctcggtttaggcccggtcacgacagcgcatccagatctggtgaacgctggcggacaaccgtgcggtgttttacccggtgcagccatgtttgatagcgccatgtcatttgcgctaatccgtggcggtcatattgatgcctgcgtgctcggcggtttgcaagtagacgaagaagcaaacctcgcgaactgggtagtgcctgggaaaatggtgcccggtatgggtggcgcgatggatctggtgaccgggtcgcgcaaagtgatcatcgccatggaacattgcgccaaagatggttcagcaaaaattttgcgccgctgcaccatgccactcactgcacaacatgcggtgcatatgctggttactgaactggctgtctttcgttttattgacggcaaaatgtggctcaccgaaattgccgacgggtgtgatttagccaccgtgcgtgccaaaacagaagctcggtttgaagtcgccgccgatctgaatacgcaacggggtgatttatgattggtcgcatatcgcgttttatgacgcgttttgtcagccggtggcttcccgatccactgatctttgccatgttgctgacattgctaacattcgtgatcgcgctttggttaacaccacaaacgccgatcagcatggtgaaaatgtggggtgacggtttctggaacttgctggcgtttggtatgcagatggcgcttatcatcgttaccggtcatgcccttgccagctctgctccggtgaaaagtttgctgcgtactgccgcctccgccgcaaagacgcccgtacagggcgtcatgctggtcactttcttcggttcagtcgcttgtgtcatcaactggggatttggtttggttgtcggcgcaatgtttgcccgtgaagtcgcccggcgagtccccggttctgattatccgttgctcattgcctgcgcctacattggttttctcacctggggtggcggcttctctggatcaatgcctctgttggctgcaacaccgggcaacccggttgagcatatcgccgggctgatcccggtgggcgatactctgttcagtggttttaatattttcatcactgtggcgttgattgtggtgatgccatttatcacccgcatgatgatgccaaaaccgtctgacgtggtgagtatcgatccgaaactactcatggaagaggctgattttcaaaagcagctaccgaaagatgccccaccatccgagcgactggaagaaagccgcattctgacgttgatcatcggcgcactcggtatcgcttaccttgcgatgtacttcagcgaacatggcttcaacatcaccatcaataccgtcaacctgatgtttatgattgcgggtctgctgctacataaaacgccaatggcttatatgcgtgctatcagcgcggcagcacgcagtactgccggtattctggtgcaattccccttctacgctgggatccaactgatgatggagcattccggtctgggcggactcattaccgaattcttcatcaatgttgcgaacaaagacaccttcccggtaatgaccttttttagttctgcactgattaacttcgccgttccgtctggcggcggtcactgggttattcagggacctttcgtgatacccgcagcccaggcgctgggcgctgatctcggtaaatcggtaatggcgatcgcctacggcgagcaatggatgaacatggcacaaccattctgggcgctgccagcactggcaatcgccggactcggtgtccgcgacatcatgggctattgcatcactgccctgctcttctccggcgtcattttcgtcattggtttaacgctgttctgacggcaaccctacagacagaaggaataaaaaatgaaaaattgtgtcatcgtcagtgcggtacgtactgctatcggtagttttaacggttcactcgcttccaccagcgccatcgacctgggggcgacagtaattaaagccgccattgaacgtgcaaaaatcgattcacaacacgttgatgaagtgattatgggtaacgtgttacaagccgggctggggcaaaatccggcgcgtcaggcactgttaaaaagcgggctggcagaaacggtgtgcggattcacggtcaataaagtatgtggttcgggtcttaaaagtgtggcgcttgccgcccaggccattcaggcaggtcaggcgcagagcattgtggcggggggtatggaaaatatgagtttagccccctacttactcgatgcaaaagcacgctctggttatcgtcttggagacggacaggtttatgacgtaatcctgcgcgatggcctgatgtgcgccacccatggttatcatatggggattaccgccgagaacgtggccaaagagtacggaattacccgagaaatgcaggatgaactggcgctacattcacagcgtaaagcggcagccgcaattgagtccggtgcttttacagccgaaatcgtcccggtaaatgttgtcactcggaagaaaaccttcgtcttcagtcaagacgaattcccgaaagcggattctacgactgaagcgttaggcgcattgcgcccggccttcgataaagcaggaacagttaccgccgggaacgcgtctggtattaacgacggtgctgccgctctggtgattatggaagaatctgcggcgctggcagcaggccttacccccctggctcgcattaaaagttatgccagcggtggcgtgccccccgcattgatgggtatggggccagtacctgccacgcaaaaagcgttacaactggcggggctgcaactggcggatattgatctcattgaggctaatgaagcatttgctgcacagttccttgccgttgggaaaaacctgggctttgattctgagaaagtgaatgtcaacggcggggccatcgcgctcgggcatcctatcggtgccagtggtgctcgtattctggtcacactattacatgccatgcaggcacgcgataaaacgctggggctggcaacactgtgcattggcggcggccagggaattgcgatggtgattgaacggttgaattaatcaataaaaacacccgatagcgaaagttatcgggtgttttcttgaacatcgacggcgaaggtaaccccattaatcaccagtcaaaacttttcaccagcgtcagctcgccagcattacgcatcggtacaataaatgtttcctgtttctcattgaccgatccttcatcggtgatcagcgtcagttgggcggtggttaattccgtttctctgcgcccaccatagtagttgatatacacctgatagcgcccgtgaattggcgcgggcatggcgaaaatctcggggccgtaccccgtcgtgacatccatatccagtgcaccactgtttttcagcacggtgttaccgtaccaggcgtgttcgccatcgggcgtaacaacgtgaaggtcgaggtcggtattgtccgtatcccacgagagaaccagccgtaaacgtgcacgaatcgttcctgtacccggcgttgagtaaaactgcattttttgtcggctttgcccatccgggctgatgacctgcacgctgttgctgccttcagtgaaaatataagggcgtgcaaatgaaccatcggattcaattctctgcggcatactggcaccgttgaccaccagccggccctgctgaactttacccgccgcagcataattctttattttgccgcggatctgcgctgagatattttgatcatctgccatgttgacggacgacgccgggtaattgatcgattgtgaaaaactggcatcttcgccctctgccggatgccagcctgagagcggtgcatcaatctcgacttcctgcacaccttcactgtgagcgacaggcgaaagcgccaccagtaacaacggaagaaaaatctttcgcatagcattagtccattaataattgtcgggtcagcgtttcgatatagttctcatcaagcccggtgggataaccatcaaaggccaggtgcagatactcatgggttaaatccagccgatcctgaagcgtaaagaagttacgaataaacagccgtttctgctgccgatcggtataggggaaacctgagactaaacggcaaaccgcaaacacgtctggttcgttgtaccccgtctcagcttgtaatatacgccgccactgcggcatttttttcgccagccaggctttcgctttgggtaataactggcaggttgagcgtggcgctccccagcggctaagactgttgtcgggataagcaaacgcgagtatctgatcgtaacgctctccctgccccgcctgggccgtggcttgccgccaggaaagtgtcccttcggtagcgcgactgccatgataatgaaccggatcgcctgcatagatgagatcctgcgtccaggcggtcatcgttcgcgcccccgtggtcgctggcgaagcagaaacacgctgcgtggcgctgctgtcggggatggtcaggcaatcgccttcccgattggcattttgctgtaaaaaagtgcgaatcgccacggtcatggctttcgctgcctcagggggcgtacttttcgcctcgcgatccagaactctggcaacgtactcttcacgatcgagatgcgactgcaatttcagtttgcccttttcgctcagtaaggtcgtctcaccgtggctgacaaacgtaatgtggttaccattagtaaacgtcacacgatagcgcccattaagtacgccgggatttactgccgtcgtactcttttccgctgtgattttcttcagcggatagcgggcaaacagctccacctctacacattgcccactggcaacctgcgtcggcactggcaaaacccgattaagcaccgtcgcataacgggttagtaccgttttgctggtgccactgccagtaacccacagcggtgtaccatcggttaaccagccagcaaaaccaccctgacggatttcctgtttatcatcggcaaaccagctccaggttttcacccgtacccgactaccgagcatggatgcgacaccgattttcgcctcgtccagcaccacatccagtaagacttcctgagctttgttttgcgcgggtaacgtcgctaatgaatcaagcagcgatttaaccgttaccgaggtttctggcttcagcgtagtcagagacgctaaccacgcaggtgcctgacgctgttgccagtattgcccccacacatctgcgccaatatgcaaccgctgcggcgcaaaatagagcccacaggaacgtaccagcgcggtatcgcgcgttatgctctccccagcctgacaacaataaacctcttccggggagtttccgcgacactggtagggctgctccggttgatgggtatcctccagccaggcgtaaacatacagtttccacaaactccctaacggcgtggtgagcgagtcaggtaatgctgagactttggtcacgcctgatgacgacagctgatacagttgatcgtgctgcgcaccgcgcagcaccagttgtaacggcgtctcctccgcaagtgttggcagagtaaccaacgccaatagccagacgattctgcgccagttcacttatttcacctgcatcccggtccattcactccctgccgcaacactttgctgcgcaggtgcataggaacgcacataacgagcaggaggcagaacgaattgccctttttgcgagaagcgcagcaaatggcggaaagtgaccgttcccgtcagttctttcaccggcaccatataggccagttcgcccatttcatttcgcgctttttccagcaattgcccctgctgtttcgcggcgttgggtttattgaccgaaatgccccatgttgtgcgctcaacgtcggctcccggtggcagcggtacttccacctgaccgtagcgcagaactgcatcctgctcgctggtaagcgtgatttcatcgagatacagcgcatcgctgtcaatctcattgctggtcaccggttgcagaataaagctcatctcttcttcaccagggataagccgatacaactggcgttcaacggtcaccggaatgttactttgttgagccatttttgccggctcacgccagcggacctgcacattttgcggcgataattcgtcaccaaaagagagaatgtccggcacgccctgaccaacccaacgccagtcttcgccccctccagttaacttatgtttagcccatgcgcccgcaggcgcaggcaaaacaactggaggcattgtcgccatatatttcgccagccagttcatggccagcgcgcgctcaatagtggattgctcagcggtcaaaccacttaaaatagcggccgtctgggtagcgtcgccaccgctattaagcagcacaaccgtgtgcgccagcggctgattgctgtttgccgctttatcccacgcatattgctgaacctgtggcatcaccgtggacttcaactgcgcttttttcagcaacgtcatggttaagacgtttgccaccgcatctgccagtggagactccggtgtatcgaggatcaggctatcattgatatcgcgggtgtcttcctcagagaaatcttcagttttagttccgctccgggcgatagcttcatccaaccctttcaacaacgttttgcacggcaaattcatctcctgcgcccatgccagcaccagcgcccgatgcaataacggcatgttatctgcctgctccgcgtagctgtcgagcatatgctgccagtattccggttgttgcgttacgccgatcgcctggctggcctgccagtcggcgtaccatgcccatgccgtaaggaaggcgtcaccattgccatcttcaccccaccaggtaaagcgcgctccgggccccgccagttgcatcagccgcagacggttatcctgaatcatctgacgaatgtcgttagcggcggcactttgatgatcggcaagcgaacgccaggcgagactgagcgggatcagacggctaccggtgttgattacgccaccccacggttcatcgactaacgcatcaagattgttgcggaaaatctcctgcggcgtttcactactttgtagccggatattgctcgcctgctcgggcaacatcagcgcgttatcgccaccaccgagcatgacatttttctgctgttcaacgggccagctgttatccacaaaagacagttttgtgctaatgctgtcctgcacttgcccattttgttgcagttctgcacttaacaagccagattgctgaatattctgcgtcagcgaaatataattcgcccctttgtgcagcgtcagcgtctggcgcatctcagcgcctgcaaatttagtcaccagcgccaccggttcgttatcctgctgactgaagataaacagtcctgccgccggtttgtcgcccacgcgatacaccgttggcatactccacttcatgtagagatttttttccgaacgcagataagcacgcccctgcccgaccagcccgtcgccgttcatcccacgcgcggtgatacgccagcgggttaacgaatcaggcatcaggaacgtgaaatacgctttgccttgtttatcggttgtgagtgacggcatccatgccgcggtatccacctcttcacgccgtggacgttcaagcatttttactcgccgctcgctgcggttagttgcgccaggcgcaaccggctcgctggagagcgcctggtcgtagctgataaacgacagactggagctggtacgcacattgttacgccccagcggatagaaaaatttgccgatattcggcgcgatttctggttgcagcgcgtagatcatttcatcgaccacgcctaccgttagctgcgcagaaacaggtttacctttcagcgacgaggttaattcgacattgaccagttcaccaggctggtaatgggttttgtccgttttcacccggatatccagctggggaacggcaactttgatcccggcgttctgaaaactgtactgaccgttacgggtatacagcaccgaaaaagtgatgttaggcgcaaaggaattgctcactggaacccgggcttcatactgggtatcgtttaaacgttgtagcgttagccagtttgccggatgcgaaagcagcgactgctgttccacgcgatcgcgttccagcgtcaataatgcttcatcaattggctccggaaaggtaatcagcatcttcgcggtttcgcctggctggtacagcgttttatccgccacgatatctaccgtaccagtatgcgccgtgctgcccttaccgctgacggcatgacttaacccagcgagaattaagccgtctttatcgcgtaatgtcagattgtagttgccaggtttagcgaaattgacggtaaaggatttgccgcctgacggtagctctccgctatggctcgtgcggtcttcgagacgcaaccattcatacgtaacaggaacctgttttgaagattccagcgcggcataacggaacacaaccgactcgccgctattactgtattgtgcggcggtacttaaagagtaatgcgccaggccgcgttcaatgaggatctctttggtggtggtgacgcgatacgccgcgccgtcactggcggagacggttaacaaatagcggctcggtttatcggcggcggggagatttaacgtcacatgaccgctggcgtcggacaccgtttcgctgccttccagcgacacggggaaacgtccggcataacgcaaatcgttaccgaccattgataattgctgagcgcgcaaacttaactgcacgcgggcattttttaccggctcgccatccgggtagagcagttgcagtttgccgctgaccgcttcgccagttttgaactcttttttgtcgagagctaaaccaatctcgaaatgtggcttgatgtagtttgccacgcgaaaactgctgctatagacctgattgcggtaagcaagacgtaactcataacctccggctacggcattttctggcaggcggaaacttccctgcccgccattgcgcgcatccagcgtgacatcgacggtttgcaacagactgccgttagcgtccagcaccgaaagcttcgccggggcgctgacgatgggggatgaatgcaacggatcgtggaactcgcggcccatcactttaacatcgacacgatcgcctgcgcgatatagcgggcgatcggtaaaaatatacaagcgggtgttgtagatttcgctttcgtagaagaagttctcggagacaaaaacgccgccttcagcatccttacccagaatgtatgaacgttctggcgatatatgttgtaactgcaaggtaccgctgtcatcggtcacaccgcgggtcatcacgccaagaccgtcagtccacaagatctctgagccgggcttcgcttcaccctgttttttacccgcggtccataccagaagctcgttacctgacactttgctaagcgccacggtatcggaaacaaacaccaccgtcgtcgcccgatacccaccaaccatcgcctcgacgaggtacagtcccggctcttgttggccgagaggaatataaatgttacccggctgcggcgagatgaaattgctggatgcgccttccagttttaccccttgctgcggctcgaccggtttagtctgccataatgggtaacggaactgttccaccagtggatattttttcagcggggaaaactggttgttctgtacataacgggaaggtttaataatggcattgccgagctgtaattcgggtaacgcctgagtcacattctgccgtgactgagaagagaaagtacgctgcatcacgcggcgagatttgccgtaccagttatcccacagccaggtcagcgtattgttcagcccgtcgcccagatattgcggttgcaccacaatgcgatgcaggtttttctgctggcgcaaaaatgccatcgggtcaggaatacgatacaggcgaacgtccacgccgccgtactcttccatctgatagcgccgataatcacgccccggcgcttccagtcgcactttcgcctcttcactgctgctaaaactgctgtcagcaagcaaaaagaatgttcccccggcgggcggcgcatagttactggaaggaagcgaatcatcagctttagcaagccctgttcccacaagagacagggacaagcacgctgctatcgcgccagaaaatttaaacgataaatgccaatgaaattgggattggaatcgttgggtatccatcgggtgtccttccatgtcataagttgttgcagactgactgcgcgcattccgttgtcagttttcgtggcgcttccggtgtggtagatgacgtaacgccccatccagaccattaagtgctgggcatcgccctgatcgaaaaaaatcatatcgccaggcagcgcctggtttatgtcctggccaatacactggctgttgtactgaatcaaattaatcgcggtcacttaggggccggttttcccgttcccctgattccagttttgtgccagttgacgctgttcaggtgttagcgtcatctctggcggcaaatactggttagataaaccgttactttttagccatttactgtcgtgaactttcagcgtctcgttcgccgcaaatcgcaccaggcccgcacaatcctgctgataccagcgtggacttggcccctggcggagctgttcttgtgcaatgcgtacaaaccaggcgcgaaacagcccggcttgttcgacattcagcatttcgctatgggcaacaacacaacacagccagcaaatcagcgccagcagcccgtgcctcatagcggctgccaggttatgggtagccactgccaggcggcaccgggttccatctgggccagcttcatgacataacgcggttgttgagataaagcgtccagcttcggcattaataaagtttgtgcggcgttataaaaaaccggttcgagattcttcggcagactggtcaacgtttcgttacgcagcagtttcgccacgccttgtggattgatatagagcggaacgatgccatcagtgggtattacatccaccattgccgggcggtttttattcagtgtttgcagggcgttattaaccagcgtgtcatcgagggagaaaagcagcgttttgttttgcatcgccagcgacacgcggaaaaaataatccgacattaattgatcgggttgcgccgcctgcgctttcggatactgaccgtatcgggaactcacttcgcgacgccagatttgcgcttcgccctgctgagtctggcttatcggcaaaacaccttctggcgctttgctttcgtgcgcaccaatattttgcgtaaacagtttccctggcaattgcgcctgttcggcagtgccatcaaactgaccgacaaacagcggggtttgcaattttgagtcttcataccagcacagccccgcggcaccgtctaacgccccattcagcttgtcgttttcctggctgatgtgcgaaagcatctcttcggcaataccgtgtgaatacggcaccgccacacagaagctggccccggcaggcatactgttccagaccggcgtaaaatcgaaactggtatctacgctggcggattcatcatttaacgccacaaaactgtgccagccgtcgttacccatttcgaagcgtacgccagcaaaagaaggcattaaccgctggtagccaaaacccagcaacctggcgctgaccacgatgcgctggcgtactggcgttttttcagcagcacgctcttccaggccaaagcttgcttgccagcgttttttgccgctcaacaaatcacctgcgatcgccgtggcttcggtatcctgctgatcatctttaaacagcatatccgtgctggaaaacactagcatcttgtcctgatatgtcgcgaacatcagagcgttattgccgttatagcgcaactgataaacaggaacagtttcactatttatcttgatgctactgatttccgttttgcttaactggctgtcgctggtagcggcaaacaacaatggctccagcagtttgcttaaaccactgcgctggatcagcaccatataatgtgaaagatggccttgtttatcgtgccacagcgctgcctgcgcgggctgatctaagagtgacgaaaagagcttatctttcagcgtgagatcgtgttcatagacaatacgacgaatgctgccttcaatgcccagacgatcggcatgattctgataatagaaaacgaaatcttcgctcagaacatcgtggagaaacggaatggtgaggagatctttgggaagctggctcagagagtcgctgtcgagaaagaggtccggctcattgagatcgatttgcagattgttgtgcaccaccagcggcgacaacgttttttctggcccactgccagcatattgcaacgcccagacgccagcggaaagcagtgctattgcgccaaaacctacaagaccatagaaccgccagccttccgcctttttttcaccactcattgccacattccttgtgtatagccagccattttttacgggcacagccaaactttaccgtgccctaatacgacaaaagcccagactttgcagcctggacttttcaattcaaacaagggagatagctcccttttggcatgaagaagtaaaattattcttcttctggctcgtcgtcaacgtccacttccggagcgatttcatcgtccccttccgcggcactgccgtcgatggtatccagatcttcctcgtcaaccggttcagcaacacgttgcagacccactacgttttcatcttccgcagtacggatgaggatcacgccctgggtgttacggcccacgatgctgatttccgaaacgcgagtacgtaccagcgtaccggcatcggtgatcatcatgatctggtcgcagtcatctacctgtaccgcgccaacaactaaaccgttacgttcggtaaccttgatggagataacccctttcgtcgcacgcgacttggttgggtattccgccactgcggtacgtttaccgtaaccgttttgcgttgcggtgaggattgcgccatcgccacgaggcacgatcagagagacgactttatcgccttcacctaagcgaataccgcgaacaccggtggtgttgcagcccatcgcacggacagaagactctttaaagcgcaccactttaccttcagcggagaacagcattacttcgtcttcgccgctggtcaggtcaacgccgatcagctcatcgccgtcaaccagtttgatcgccactttaccggcggtacgcagacggttgaactcggtgaggacagttttcttcacggtaccgtgagcggtcgccatgaagactttcacgccttcttcaaactcggtcactggcaggatcgcagtgatacgttcgtcctgctccagcggcagcaggttgacgatcggacgaccgcgcgcgccacgagtggcttccggcaactgataaactttcatcgaatagacgcgaccacggctggagaagcacagaatatggtcgtgagtgttcgccaccagcagtcggtcgataaagtcttcttctttaatacgtgcggcagatttacctttcccgccacgacgctgcgcttcgtattcagaaagcggctgatacttaacgtagccctggtgagagagcgtcactaccacatcttcctgagtgatcagatcttccaggttgatgtctgcgctgttggcggtgatttcagtacgacgtttgtcaccgaactgttcacgaaccagctccagttcttcacggatcacttccatcaaacgatcggcgctaccaagaatacgcaacagttccgcgatctgatccagcagctctttgtattcgtcgagcagtttttcgtgctcaaggccggtcagtttctgcaaacgcagatccagaatcgcctgagcttgctgttcggtcaggtagtacagaccatcacgcacgccgaactctggctccagccattccggacgcgcagcatcgtcgccagcacgttcgagcatcgcggcaacgttgcccagctgccacggattagcaaccagcgcagttttcgcttctgcaggcgtcggcgcatgacggatcagttcgatgatcgggtcgatgttcgccagcgccacggctaatgcttcaaggatatgagcacgatcgcgagctttacgcagttcgaaaatagtacgacgggtcaccacttcacggcggtgacgaacaaacgccgcgatgatgtctttcaggttcatgatcttcggctgaccatggtgcaatgccaccatgttgataccgaaagaaacctgcaactgggtctgggagtagaggttgttgagcacaacttcaccgaccgcatcgcgtttcacttcaatcacgatgcgcataccgtctttgtcagactcgtcacgcagcgcgctgatgccttccacgcgtttttcttttaccagttccgcaatcttctcgatcaggcgcgctttgtttacctgatacggaatttcgtggacgataatggtttcacgaccggttttggcgtcaacttccacttctgcgcgagcgcggatatacaccttgccgcgaccggtacggtaagcttcttcaataccgcgacgaccgttaatgattgccgccgtcgggaagtccggccccgggatgtgttccatcagcccttcaatgctgatgtcttcatcatcgatatacgccagacaaccgttgatgacttccgtcaggttgtgcggcgggatgttggttgccatacctacggcgataccggaagaaccgttcaccagcaggttaggaattttggttggcatgacgtcgggaattttttccgtgccgtcatagttatcaacgaaatcgaccgtctctttttcgagatcggccatcagttcatgggcaattttcgccagacggatttccgtataacgcattgccgccgcagagtcgccgtcgatggaaccgaagttaccctgaccgtctaccagcatgtaacgcagcgagaatggctgcgccatacggacgatcgtgtcataaaccgccgagtcaccatggggatggtatttaccgattacgtcaccaacgacacgggcagattttttataggctttgttccagtcattgcctagtacgttcatggcgtaaagtacgcgacggtgtaccggcttcaggccatctcggacatctggcagcgcacggccaacaatgaccgacatcgcataatccagataggagctcttcagctcttcctcaatgttgaccggtgtaatttctctcgcaaggtcgctcatctaaccgctatccctctactgtatcccggattcaaaggtcgcaaattataacacagccgcgcagtttgaggtaaacctatacgctttattcacatccaatgcctgatatactcgtttgtcttgccaattacggagtagaagtgccaatgaatgccgaaaaatcgccggaaaaccataacgtagaccacgaagagatcgctaaatttgaagccgtcgcctcccgctggtgggatcttgaaggtgagttcaaaccgttgcaccgcattaacccgctgcgtctgggctatattgccgagcgtgctggcggtttatttggcaaaaaggtgctcgatgtcggttgtggcggcggcattctggccgagagtatggcgcgcgaaggcgcgacggtgaccggtctggatatgggctttgagccattgcaggtggcaaaactgcacgcgctggaaagcggcattcaggtggattatgtgcaggaaaccgtggaagagcacgcggcaaaacatgccgggcagtatgatgtggtgacctgcatggagatgctggagcacgtccccgatccgcagtcagtggtcagagcctgtgcgcaactggtgaaaccaggcggcgatgtctttttctcgacacttaaccgcaacggcaagtcatggctgatggcggtggttggtgcggaatatattttgcgcatggtgcccaaaggcacgcatgatgtgaagaagtttattaaaccggcagaattgctgggctgggtggatcagaccagtttaaaagagcggcatatcactgggctgcattacaacccgatcactaatacttttaaactcggccccggcgtggatgtgaactatatgctgcacacgcagaataagtgaggttgatgtttggccgcgccaatgcctgatgcgacgcttgccgcgtcttatcaggcctacaaatgctccccgtaggccggataaggcgtttacgccgcatccggcaaccgtgccgactagacagtgattaccatttcaccgtcatcgacaaaaaccctgccgtctgggcaaaatcatcactccctttctgccacgccacgctgccgcgcagggacactcgctgactgatattgcccgtgactcccacttttatttcaccccgttgcttcaccgcatcgtcactgatagtgctgccatcctcttcaatttccgtcgaatggggatcgtgataataattcagatctaatgttggtatgacatgaacagcggtacgccattcgctgtgtaaacccagccgcgtctgaatatcatcaccctgcgattgtgacacgcgcgcacggttagcggcggtaaaatcatcctgctgcacgccctgataaatcacctgcgcctgcggttcaatcaccacaccacgccccggtaaccactgataccccgcctccagcgaggcgataatccccgacgagtggtaatgatctgtgccatcttcttgttcggaaacatcattgctaaaccacgcgtattgcagccagctatccagccaggccccttgcttctgattaccgtgctgaaaccagcttgatgtcagcccaacggcataaccgtggttctggttatcggcgcgagttccggtcatattcgagcggctgtcgccctggttatcgctgtagccaccaacaatcccaagcatccactcgccatccgtgccccagcgcccgctaaacagatcgccgctaagttgcaccgtagaagtgtcttcatgttgagccagttgccccgctgctgtgtaatgataatctccgccgataacacgtaaattcagcgtctgaccatcgccacctgcgtgatcgcgtcgctccatcataaacgcctgatttgccgcccgcaggttattgagataaccgccaactttggcattcagcaccggctggtaaacaggcacaggggccgggtcgggggttgggtcaggatccggcgtgggatcaggatcgggagtcgggtctggctcaggtggcgatggcggcgttacttcttgcgatcgcagataccagtcgttgttatcttccaccagcgtgtagtcatacgctcccatattgacgtagccgctgcctgccagactgaactgcgcattgttttgaaactgcgtgggatcagctgcgaaatcaaccactttaatgcctgtcgatgtcggctcaccaatccctgtaatggagttaaccaccacagttgtgttgccagcagtattaccgttcatcaccaattgatcgcttaccgagtcatcgccgtttaattcgctatcgagcagtagcgtaccgccgccggtataatcaccgtttaccgtcagcgtatcgccagcgacgccattttgcaggctaaccgcaccggacgtattggtcagattgccattaaccgtcacgttggaaagataagtcaggctgtcagtttcaaggttggtattaagctcacctgtcaacgtcacaccatcggtggcattcaccagcgtcccatcgccgttaaatagtgaggcattaagggcgacggaagtatcctgcccggtcaggcgcaaaaccgtaccatcgctgatgtcgatagtgccgctggaaatagcatcaattgactgaatatcctgatccgcgccagtaacgaacgttgccccatcaccaacccacagtgacgaagcataaggaaggatatcagcaacatcacctttcagggtgccttcttcgacacgtaccgccgactgcgttgtaccgctggcggtcagctccagtgtaccagcccccgttttagtcaatgtgctaccctcatcctgatgctgcccgctgctgtcagccatcagtgcgccccactgcgtgtctacccccgcatcaactgccacttcaccgtcggcgcgcatttcaatatcacgtccgtggcctgccgcatctgaacgcgtgtcaacgtcggaggtaatctccatcacgctttcttgttgcttatcggtaaagataacctggcggttatagtgggtatctccaagctgcgagttgtcgctcaccatcagcgtaccggaggcgatttgtgttgtgcccaaataactattattgtttgccagacttacctgcccgtcgctcgcatcgaccaccacgtagacgccatctttcccgtcgccgccgatatgcaaattgtcgccacctgcaagatctaccacatcctgactgccgataaccgttccgctgctgccactgacttcaaggccatcgttgtatgatgtgccgctctgccaggtggagaaatcagagagatcgagcacaccgccgtttaacacgatcgactgcggatcgtcctggagagcggtaagatctgccgcgtcgccttccagcgaaagcaccgcaccatcatcaacgactatatcgccggttagcgccatcgactgcgcccctgccagcacgtagctgccgttttgcgcaatggtgagctgaccagcaccttcgatgatgccagcaaaactgccctgattaacagtaacgttgccaccagcatcgatatttaaagtgccattctgaaagcccgtcaatgcgtgcacaaaagtttgttgggtcgagccaacgtttagctcagcctgattctgatactgatcaatactccctatcgtcagaccgtagcagtcttgcggatcgtcctggcaatgcgtatcgccgacattcatcagggagttgctgcggcccagggtaacttcaccgttttcaatctgcatctcaccagtaaagtcattgttatctgcattaagtaccagatcgccggaacctgttttggtgattaacccggtaccagcaatagagtcaacagctccgtcattctctgtattgccaataaccagcgtttttccgtcggcaatatcaaaggtaacttcacttaagccgagatacataaagccacccgccgcagaggaaggaccatctccatagcctgctgcgctattgttctcatcgactaacacgcctccgttctggctgtagctgtcatcaacagaaatatcaataagatagggagccgtcacgctattggtatatatcgccccgccataaccttcggcagtgttatttgtaaaggcagtgttatttactatcgtataacctgaaggatgcttgctgtcgctattattatcggtaacatcgattgccccgccatcgccatcactgtaacttgttgatgtatatgcctggttgttatcaaaaataacatcacttaaataaacgtcattattaatggtataaattgcgccacctttgccatcattagcgatgttattgcgaaacatggcgttagtgacacgtaaatcgacggcaccagtatcgttagtaccagaagaatagattgcgccaccatagccgcctgcgacgttaccggaaaaaataacatcagtaagattcagcgttgagttttctttagcaaatatggccccgccgttattatattctcctgtaacggtgttattggcaaacagagtcattccagtttcattttctggtaatagtgaaaattccgctccttgttgcaaaaatacggccccaccgctggcgttattggtcatatccgaaaaaaccagccattgcccatcagcgatactccagtcctgcgtaatgcctgaaaggctttgcctgctggcctgacaactcgctttgacatcatatccctggcatgaatcagtgaccgccgcgacaccgttagcagagaaaagagatgcaatcattgacgggagtaaagataaatactccttgcgtagaaagataatccgcatattaatctaaccatcattttctataagacggcgtatttaatcgcattatacgatatggaatatctttcttttgtaaattgttcaacccggtgcaatggctattttgttattatttgatgaataatatcagtgcgtcataattcaagttaataaccttcagggatatcagttatatttaaactaaattaaagtcatgaataattttcttataatataaggtaaattaacaaaatggcttagcatttaacaataaccgaatagaaaacaaccatttcgccatcaacaatctcttacattcgcttatatattgaccacaactgatacatcagattatgtgatgactcgtgcttagatcaatttttgcaatcattagcaaaaagattaataaaccatctatatcaatttatctaacctattatgccgttcaagaaatcgccgaacagttatttttaacaaatttttctcttcccattgactttcccggacaccttgtctgacctaaggtgcgcgaaagccactttttccttcctgagttatccacaaagttatgcacttgcaagagggtcattttcacactatcttgcagtgaatcccaaacataccccctatatatagtgttctaagcagcttcccgtactacaggtagtctgcatgaaactattgcggaaagaattccaaaaacaggtacgacatacatgaatcagaatctgctggtgacaaagcgcgacggtagcacagagcgcatcaatctcgacaaaatccatcgcgttctggattgggcggcagaaggactgcataacgtttcgatttcccaggtcgagctgcgctcccacattcagttttatgacggtatcaagacctctgacatccacgaaaccattatcaaggctgccgcagacctgatctcccgtgatgcgccggattatcagtatctcgccgcgcgcctggcgatcttccacctgcgtaaaaaagcctacggccagtttgagccgcctgcgctgtacgaccacgtggtgaaaatggtcgagatgggcaaatacgataatcatctgctggaagactacacggaagaagagttcaagcagatggacacctttatcgatcacgaccgtgatatgaccttctcttatgctgccgttaagcagctggaaggcaaatatctggtacagaaccgcgtgaccggcgaaatctatgagagcgcccagttcctttatattctggttgccgcgtgcttgttctcgaactacccgcgtgaaacgcgcctgcaatatgtgaagcgtttttacgacgcggtttccacatttaaaatttcgctgccgacgccaatcatgtccggcgtgcgtaccccgactcgtcagttcagctcctgcgtactgatcgagtgcggtgacagcctggattccatcaacgccacctccagcgcgattgttaaatacgtttcccagcgtgccgggatcggcatcaacgccgggcgtattcgtgcgctgggtagcccgattcgcggtggtgaagcgttccataccggctgcattccgttctacaaacatttccagacagcggtgaaatcctgctctcagggcggtgtgcgcggcggtgcggcaacgctattctacccgatgtggcatctggaagtggaaagcctgctggtgttgaaaaacaaccgtggtgtggaaggcaaccgcgtgcgtcatatggactacggggtacaaatcaacaaactgatgtatacccgtctgctgaaaggtgaagatatcaccctgttcagcccgtccgacgtaccggggctgtacgacgcgttcttcgccgatcaggaagagtttgaacgtctgtataccaaatatgagaaagacgacagcatccgcaagcagcgtgtgaaagccgttgagctgttctcgctgatgatgcaggaacgtgcgtctaccggtcgtatctatattcagaacgttgaccactgcaatacccatagcccgtttgatccggccatcgcgccagtgcgtcagtctaacctgtgcctggagatagccctgccgaccaaaccgctgaacgacgtcaacgacgagaacggtgaaatcgcgctgtgtacgctgtctgctttcaacctgggcgcaattaataacctggatgaactggaagagctggcaattctggcggttcgtgcacttgacgcgctgctggattatcaggattacccgatcccggccgccaaacgtggagcgatgggtcgtcgtacgctgggtattggtgtgatcaacttcgcttactacctggcgaagcacggtaaacgctactccgacggcagcgccaacaacctgacgcataaaaccttcgaagccattcagtattacctgctgaaagcctctaatgagctggcgaaagagcaaggcgcgtgcccgtggtttaacgaaaccacttacgcgaaagggatcctgccgatcgatacctataagaaagatctggataccatcgctaatgagccgctgcattacgactgggaagctctgcgtgagtcaatcaaaacgcacggtctgcgtaactccacgctttctgctctgatgccgtccgagacttcttcgcagatctctaacgccactaacggtattgaaccgccgcgcggttacgtcagcatcaaagcgtcgaaagacggtattttgcgccaggtggtgccggactacgagcacctgcacgacgcctatgagctgctgtgggaaatgccgggtaacgatggttatctgcaactggtgggtatcatgcagaaatttatcgatcagtcgatctctgccaacaccaactacgatccgtcacgcttcccgtcaggaaaagtgccgatgcagcagttgctgaaagacctgctcaccgcctacaaattcggggtcaaaacactgtattatcagaacacccgtgacggcgctgaagacgcacaagacgatctggtgccgtcaatccaggacgatggctgcgaaagcggcgcatgtaagatctgatattgagatgccggatgcggcgtaaacgccttatccggcctacggctcggtttgtaggcctgataagacgcgccagcgtcgcatcaggctccgggtgccggatgcagcgtgaacgccttatccggcctacggctcggatttgtaggcctgataagacgcgccagcgtcgcatcaggcacaggatgcggcgtaaaatgccttatccggcattaaactcccaacaggacacactcatggcatataccaccttttcacagacgaaaaatgatcagctcaaagaaccgatgttctttggtcagccggtcaacgtggctcgctacgatcagcaaaaatatgacatcttcgaaaagctgatcgaaaagcagctctctttcttctggcgtccggaagaagttgacgtctcccgcgaccgtatagattaccaggcgctgccggagcacgaaaaacacatctttatcagcaacctgaaatatcagacgctgctggattccattcagggtcgtagcccgaacgtggcgctattgccgcttatttctattccggaactggaaacctgggtcgaaacctgggcgttctcagaaacgattcattcccgttcctatactcatatcattcgtaatatcgttaacgatccgtctgttgtgtttgacgatatcgtcaccaacgagcagatccagaaacgtgcggaagggatctccagctattacgatgagctgatcgaaatgaccagctactggcatctgctgggcgaaggtacccacaccgttaacggtaaaactgtgaccgttagcctgcgcgagctgaagaaaaaactgtatctctgcctgatgagcgttaacgcgctggaagcgattcgtttctacgtcagctttgcttgttccttcgcatttgcagaacgcgaattgatggaaggcaacgccaaaattattcgcctgattgcccgcgacgaagccctgcacctgaccggcacccagcatatgctgaatctgctgcgcagcggcgcggacgatcctgagatggcggaaattgccgaagagtgtaagcaggagtgctatgacctgtttgttcaggcagctcaacaggagaaagactgggcggattatctgttccgcgacggttcgatgattggtctgaataaagacattctctgccagtacgttgaatacatcaccaatatccgtatgcaggcagtcggtttggatctgccgttccagacgcgctccaacccgatcccgtggatcaacacttggctggtgtctgataacgtgcaggttgctccgcaggaagtggaagtcagttcttatctggtcgggcagattgactcggaagtggacaccgacgatttgagtaacttccagctctgatggcccgcgttaccctgcgcatcactggcacacaactgctgtgccaggatgaacacccttcccttctggcggcgctggaatcccacaatgtggcggttgagtaccagtgtcgcgaaggttactgcggctcctgtcgcacacgcctggttgcaggtcaagttgactggattgccgaaccgttagcctttattcagccgggggaaattttgccctgttgttgccgggcaaaaggcgatattgaaatcgagatgtgaattggttgtagtgccagatacaacgcttatgcgtcttatctggcctacaacgattacatggcgtagtaatacgctttcacctgctcccagtccgctttggggattggctccagatatttttccagctggcggaagtcatgattaatcgctttatcgcgacgcaagcggcgacgacttttctccaggtcaagaaaaccagcttctgcattaccttctgttttcacatagatatggcgaacataacaacagccatgctgacgattaatgctatgcattttcttaaacgccagcgccactgctttcaacatggcttgccgtacttcgtcagaataaggcgatactgcatgctgggcataccagtcagcaatgctgatgaaccccgccatatcttcagtcaccagcaacgctcgccattcaccctcaattttcaccgcttcaccaaaaacgatcttcggcacgatgacaccggcccgttccagttctttaattaccgcaacctcacggacaatcgttggtcggccgaacggataacgtacggaatgaaacagatgatgcgtcatgcgctttacatacagctttttgccgttgcgctcgacgcattgcaccccgctcataccattacggcgatagttaggctcttcaacccagtcgccctctgttgcccaccagtgattaaattcgtcgtactttgctgaaactgccataccctatcgcctgtcatttttattaacgacaatgactataggtggttacctgaggaaaatcttaatgaaacgtgtcgtattaatgaatttcttttgccactactagcttgacaccgcttttacccttcatttgcagcgcatagattccaccagccactaccactaatagtgcgcccagcagataaaatgtgaatttaatcaggcggatacagcgatgaattttattcgacagggattaggcatcgccttacaaccagagttaacgctgaaaagcattgcaggtgaattgtgttccgttcctctcgaaccaactttctatcgacagatttcgttgctggctaaagaaaagccggtagaaggcagtccactgtttttactacaaatgtgcatggaacaattagtggcgattggaaaaatttgatatgagacaggatggcgcatgaacgccatcctgcagtagcattactctttattaaggaattttactgccttatcagggaaatcagtaaacagcccatttacacccgctttgttatacagagcatcatataactgattcacatcagtagtgtattcaggcagtttatctgaccgcacggtataaggatgcactaccagtttattctgctgagcatcttgcaccatgccagtgagtttgatattacccggctgcgatgtttcctcaatcaacatatggtaatccggcccgataccgtcggcatattccgccacctgtttcatagcacccggcttaaacatccagtcgtagttgtaattaacccagcttccatccggctgtttctgctgcgtttcattccagtcggtataggcaatcagctgtaccagattgagatccatgcccattttgggttccagctcattcttaatacgcttcagctcatcagcatcaaaacattgcaaataaactttatcgtctttaccggtgtaaccatatttcttcagcacttccagcgtttttgccgcaatatccttcccttcctgatgatggaaccacggcgctttgatttctggataaataccgatatttttcccggtagagtgatttaacccctgaacaaattcaatctcttcttcaaaggtgtgcacccggaagtcggacttacccattgggaaacgccccggataagtctgcacttttttaccgttttcaatatcgaaaccttcggtaaatttcaacgacttaatttcatccagcgtgaaatctatcgcgtagtaacgaccgtctttgcgcgcccgatccgggaaacgatcggcaacatcagtaacacgatcgaggtaatggtcatgcagaacaaccagattgtcgtctttggtcatcaccaaatcctgttccagataatccgctccctgcgcatacgccatcgcttttgctggcagcgtatgctccggcaaatatccactggcaccgcgatgggcgatgactattttttcgttgctgtccgccgccattgcactgcttcccatgactatagtgctcatcatgatcgccatgctaaggtttttcagcgtcaatttcatgccattagcctccgttgcgtttttgcagtaattgttcatggcgacgtttttcgccaatcatcacaacaatcaacaagataaccgccagaatgctgccgccaatcattaccataaagccgccatcccagccgaagaagtccacggtgtagccaacaatcgcgctcgccgccaccgaaccgcccaggtaaccaaacagcccggtaaagcccgctgccgtacctgccgcttttttcggtgccagttccagcgcatgcagaccgatcagcatcacaggaccgtagatcaggaagccgataacaatcatacaaatcatatcgacggttgggttacctgccgggttcatccagtaaacgatagtcgcgatggtcaccagtgtcataaagaaaacgccggttgccccacggttgccacggaagactttatccgacatccagccgcacagcagagtgcccggaatacctgcatattcataaaggaagtaggcccaggaggatttatccagcgcgaaatgcttaacctctttcagataagtcggtgaccagtcgaggatgccgtaacgcagcagataaacgaacacgttggcgatggcgatataccacagcagtttgttcggcagcacgtactgcatgaagatttgcttcgcggtcagctcctgttccgctttttcgttatagtcgtccggataatcatttttgtactcttcgatcggcggcaagccacaggattgcggggtatcgcgcatcatcgcaaaggcgaataatgccaccagaatggcgcagaaagcaggcatatagagcgccgcatgccagtcattgaaccaggccatccccagcaggaacagcagcggcggaataccaccaccgacgttgtgcgcacagttccacactgacacaatgccgccacgttctttctgcgaccaccagtgcaccatagtacgaccacacggcggccaccccatcccctggaaccaaccgcagaggaacaacagtacaaacatcaccgcaatgctcgacgtcgcccatggcacaaagcccataaacaacatcactgccgccgccagaatcaaacctgcgggcaggaaaacgcgcggattcgagcgatccgataccgaacccatgatgaatttcgaaaatccataagcaatcgagatccccgaaagggcaaaacctaaatcaccgcgtgagaatccctgctcaaccagataaggcatagcaagcgcaaagttcttacgaaccaaatagtaagccgcatagccaaagaatatccccaggaaaatttgccagcgcaatcgacgataagtcggatcgatctccgcggcaggtaagcgcgctttgtgtggcgctggtttaaaaatactcaacattgatagcctccgtggcccgtggtcttatttatgattaacagcctgattcagtgagagaacctgctgtttcttgagttgccgcgatgttaagaaaacattcataaattaaatgtgaattgccgcacacattattaaataagatttacaaaatgttcaaaatgacgcatgaaatcacgtttcactttcgaattatgagcgaatatgcgcgaaatcaaacaattcatgtttttactatggctaaatggtaaaaaacgaacttcagagggataacaatgaaaactcgcgactcgcaatcaagtgacgtgattatcattggcggcggcgcaacgggagccgggattgcccgcgactgtgccctgcgcgggctgcgcgtgattttggttgagcgccacgacatcgcaaccggtgccaccgggcgtaaccacggcctgctgcacagcggtgcgcgctatgcggtaaccgatgcggaatcggcccgcgaatgcattagtgaaaaccagatcctgaaacgcattgcacgtcactgcgttgaaccaaccaacggcctgtttatcaccctgccggaagatgacctctccttccaggccacttttattcgcgcctgcgaagaagcagggatcagcgcagaagctatagacccgcagcaagcgcgcattatcgaacctgccgttaacccggcactgattggcgcggtgaaagttccggatggcaccgttgatccatttcgtctgaccgcagcaaacatgctggatgccaaagaacacggtgccgttatccttaccgctcatgaagtcacggggctgattcgtgaaggcgcgacggtgtgcggtgttcgtgtacgtaaccatctcaccggcgaaactcaggcccttcatgcacctgtcgtggttaatgccgctgggatctgggggcaacacattgccgaatatgccgatctgcgcattcgcatgttcccggcgaaaggatcgctgctgatcatggatcaccgcattaaccagcatgtgatcaaccgctgccgtaaaccttccgacgccgatattctggtgcctggcgataccatttcgctgattggtaccacctctttacgtattgattacaacgagattgacgataatcgagtgacggcagaagaggttgatattctgctgcgtgaaggggaaaaactggcccccgtgatggcgaaaacgcgcattttgcgggcctattctggcgtgcgcccgctggttgccagcgatgacgacccgagcggacgtaacgtcagccgtggcatcgtgctgctcgaccatgctgaacgcgatggtctggacggatttatcaccatcaccggtggcaaactgatgacctatcggctgatggctgaatgggctaccgacgcggtatgccgcaaactgggcaacacgcgcccctgtacgactgccgatctggcactgcctggttcacaagaacccgctgaagttaccttgcgtaaagtcatctccctgcctgccccgctgcgcggttctgcggtttatcgtcatggcgatcgcacgcctgcctggctgagcgaaggccgtctgcaccgtagcctggtatgtgagtgcgaagcggtaactgcgggtgaagtgcagtacgcggtagaaaatttaaacgttaatagcctgctggatttacgccgtcgtacccgtgtggggatgggcacctgccagggcgaactctgcgcctgccgcgctgccggactgctgcaacgttttaacgtcacgacgtccgcgcaatctatcgagcaactttccaccttccttaacgaacgctggaaaggcgtgcaacccatcgcctggggagatgcactgcgcgaaagcgaatttacccgctgggtttatcagggattgtgtggtctggagaaggagcagaaagatgcgctttgatactgtcattatgggcggcggcctcgccggattactctgtggcctgcaactgcaaaaacacggcctgcgctgtgccattgtcacgcgtggtcaaagcgcgttgcatttctcatccggttcgctggatttgctgagccatctgccagatggtcaacccgtggcagacattcacagtggactggaatctttgcgtcagcaggcacctgcacatccttactcccttctcgggccacaacgcgtgctcgatctcgcttgccaggcgcaggcattaatcgctgaaagcggtgcgcaattgcagggcagcgtagaactggctcaccagcggattacgccgctcggcactctgcgctctacctggctaagttcgccagaagtccccgtctggccgttgcccgcgaagaaaatatgtgtggtcgggataagcggcctgatggattttcaggcgcatcttgcggcggcttcgttgcgcgaactggatctttcggttgaaaccgcagaaatagagctgccggaactggatgtcctgcgcaataacgccaccgaatttcgcgctgtgaatatcgcccgtttccttgataatgaagaaaactggccgctgttacttgatgcgcttattcctgtcgccaatacctgcgaaatgatcctgatgcccgcctgcttcggcctggccgatgacaaactgtggcgttggttgaatgaaaaactaccttgttcactgatgcttttgccaacgctgccgccttccgtgctgggcattcgtctgcaaaaccagttacagcgccagtttgtgcaccagggtggcgtgtggatgccgggcgatgaagtgaaaaaagtgacctgtaaaaatggcgtagtgaatgaaatctggacccgcaatcacgccgatattccgctacgtccacgtttcgcggttctcgccagcggcagtttctttagtggcggactggtagcggaacgtaacggcattcgcgagccgattctcggccttgatgtgctacaaaccgccacgcggggtgaatggtataagggcgatttttttgcgccgcaaccgtggcagcagttcggtgtaaccactgatgagacgctacgcccgtcgcaggcagggcaaaccattgagaacctgtttgccatcggttcggtgctgggcggatttgatcccatcgcccagggatgcggcggcggtgtttgtgccgtcagtgctttacatgccgctcaacagattgcccaacgcgcaggaggccaacaatgaacgacaccagcttcgaaaactgcattaagtgcaccgtctgcaccaccgcctgcccggtgagccgggtgaatcccggttatccagggccaaaacaagccgggccggatggcgagcgtctgcgtttgaaagatggcgcactgtatgacgaggcgctgaaatattgcatcaactgcaaacgttgtgaagtcgcctgcccgtccgatgtgaagattggcgatattatccagcgcgcgcgggcaaaatatgacaccacgcgcccgtcgctgcgtaattttgtgttgagtcataccgacctgatgggtagcgtttccacgccgttcgcaccaatcgtcaacaccgctacctcgctgaaaccggtgcggcagctgcttgatgcggcgttaaaaatcgatcatcgtcgcacgctaccgaaatactccttcggcacgttccgtcgctggtatcgcagcatagcggctcagcaagcacaatataaagaccaggtcgctttctttcacggatgcttcgttaactacaaccatccgcagttaggtaaagatttaattaaagtgctcaacgcaatgggtaccggtgtacaactgctcagcaaagaaaaatgctgcggcgtaccgctaatcgccaacggctttaccgataaagcacgcaaacaggcaattacgaatgtagagtcgatccgcgaagctgtgggagtaaaaggcattccggtgattgccacctcctcaacctgtacatttgccctgcgcgacgaatacccggaagtgctgaatgtcgacaacaaaggcttgcgcgatcatatcgaactggcaacccgctggctgtggcgcaagctggacgaaggcaaaacgttaccgctgaaaccgctgccgctgaaagtggtttatcacactccgtgccatatggaaaaaatgggctggacgctctacaccctggagctgttgcgtaaaatcccggggcttgagttaacggtgctggattcccagtgctgcggtattgcgggtacttacggtttcaaaaaagagaactaccccacctcacaagccatcggcgcaccactgttccgccagatagaagaaagcggcgcagatctggtggtcaccgactgcgaaacctgtaaatggcagattgagatgtccacaagtcttcgctgcgaacatccgattacgctactggcccaggcgctggcttaaactcctttctgatgcccggtaagcatgtggttaccgggcatttttgcgtacacgattccgtgcccaatgtatgcgttgcaacgcagtgaaaattcctctgaaaacgtctcgcaaaggctgaaactggcagatgtcaaaggcctgggataaccgtaatgtcgcgtcatcataaatatcaggtgacggacaaccatgaccgaatcaacaacctcctccccgcatgatgcggtatttaaaacctttatgttcacacccgaaaccgcacgggattttctcgaaatacatttaccagaaccactgcgcaagctttgcaacctgcaaaccttacgcctggaacccactagttttattgaaaaaagtttacgcgcttactactcggatgttttgtggtccgtggaaaccagcgacggtgacggctatatctactgcgtgattgaacatcaaagctctgcagaaaagaatatggcttttcggctaatgcgctatgccactgccgccatgcagcgtcacctggacaaaggctatgacagagtcccgctggtggtgccgttgctgttttatcatggcgaaacctcgccttacccgtactcactcaactggctggatgagtttgacgatctgcaacttgcccggcagttgtacaccgaagcttttccgttggtggatatcaccatcgtacctgacgatgagatcatgcaacatcggcgtatagctctgctggaactgattcaaaagcatattcgcgaccgcgatttaatcggcatggtcgacaggatcaccacgcttttggttagaggcttcactaatgacagccagctacaaacactgtttaattatctgctgcaatgcggcgatacctcccgtttcacccgttttattgaggagattgccgaacgttcaccactacaaaaggagagattaatgactattgctgaacggctacggcaggaagggcatcaaattggctggcaggaaggtatgcatgaacaagccattaaaattgctttgcgcatgctggagcagggctttgaacgtgagattgtgctggcgacaacccaactcactgatgctgatattccgaactgtcattaaaaggagagattaatgactattgctgaacggctgcggcaggaaggacatcaaattggctggcaggaaggtaaattagaaggtttgcatgaacaagccattaaaattgctttgcgcatgctggaacagggctttgatcgtgaccaggtgctcgcggccacccagctaagcgaagccgatctggcagcgaataaccactaattaacacaggcccacagccgatccccatgggcctttgatatcaataactaccttttatgcgtggcccatttttgcctgatttaaacatcgccagtcgttgatccagggcatcgctgtagagcatcgtgtcaacgccaacagcgacaaagttcgctccccacgccaggcattgctgcgccatatcaggagccacagccagaaaaccagccgctttacccgcagcacggatccgccgaatactggtttcaataattcgctgcacttccgggtgcccggcgttatccgggtagcccaacgacgcagaaagatccgcaggtccaataaacacgccatcaatcccttcgacgtcgaggatttcgtccaggttatccagtgccgttttactttccacctgcaccaacagacaaagcgaatcgttaacttgcgccatgtaattctcaatgcgtccccagcgcgcagcccgtgccacactggccccgacaccacgctcaccgtagggaggatagcgcgtggcagacaccacctgacgtgcctgttcggcagtatcgaccatcgggatcagtagagtttgcgcgccaatatccaggacttgtttaatcagcggtttactgccttccaccggacggatcacgggttggctggcatagggcgctaccgcctgtagctgatgataaagatcctgaatggtgtttggcgcgtgctccccgtcaatcagcaaccagtcataaccagaagtggcggcaatttctgccatataggcagtcgttgagcttaaccacagaccaatttgcacttcgcccttgcgtaaacgttctttaaagggattgcttaataatgcgttcatcgtgttccttaacctatttaatgatgtgccacgtcggtctgcgcaacagtgcgatttacacgcagagtgaaaataatcagcgaaccgatgaccgccaccgctgccagcgtcagtaatcccgccgcatcgctggcaaataacgtttctgctttcacgcgcaggatcggggcaataaacccgcccactgcaccaaacaggtttacaaaaccaattcccgcagccagcgccgtaccggaaagcagttgtgtcggcatcgtccagaacactggctgcacggcaataaacccgatagctgcaacacacagcgctacgatcgccattactggagaaagcagcccgaacagaccaataccaatgcccgccgccagtaatgtcagcgctgcgacattacgccgttcgccggttttatcggaatagcgcggaataagccaggtcccaaacaaggccgcaacccacggaatggcggtgaccaccgacgctgtaaagcccacttttgttcccagcaatgccgcaacctgggtcggcaggaagaaaattaatccgtaaaccgccacctgaatggtcaggtagataatcgctagttgccagactcggccattacgcagcgcatcgctcagccgagaagtcactttctgttgttcttcacttgccagttgattgataagcaacgttttttcttgtttactcagaaaacgtgcctgctccggtgtgtcatcaagccaaaagaatgtgaataccccagcaccgactgccaacaatccttcaatcacaaacatccagaaccagccgggatgccccataaatccatgcatctccaacagcgcgccggaaagcggtgatcccagtgttaacgccagcggtgcgcccatatagaacagccccataatgctggcgcgattacgctgcggaaaccattgcgaggtgagataaatcataccagggaaaaatccggcctccgcagcaccaagcagagtgcgaactatcagaaatttcgcttcagtatcggcccatgccatggctgccgaaagaaatccccacagcagtgttgtcgtaccaatccaggttctggcccccagtttgcgcatcaaaagattcgccggaacacccagaaacgcatataccacaaagaaaatgcctgctcccagcgcataagcttcattactcaacccggtatcaatctggtaggtctgtttggcaaaaccgatattcgaacggtcgagaaacgccagcacatacagcgccaacataaacggaattaaacgcacacggtttttcttcaccacggcgtcaagcaaagcggtgctcataaaaagctccttagaatatgtgggcgttaccgttgtcacagcaacgcccggagtgattagtggctgtaggggcgtttcaaattgcagtcacgattgagttcgacgccaaaaccgggtttatcaagcactgatttatgaatacgaccattcaccggaaccggctcattgagcagaatcgggtcaaactgcggacgcatcgttgaacaatccgggctggtcatcaggaattcgctgaatggcgtattggtgaaggtgatcaccgcatggtgagagtaaacagacgaaccgtgcggcaccaccagttgccccctggatttggcgattgcggcaatttccaccagcgtggttaaaccaccgcaccagccaacatccggctgcataatgtcgataccggtttctgaaagcgtacgaaaagattgcagtgtgccgtggtgctcaccgctggtgaccatcattccgactggcgcgttgcgtttcagttcgcgataactttcatactgctgtggcggcaggcactcttcgatccatttcaggttatagggcgcgcaagcgtgggccagtttggtcgcatagttcacgtcctgactcatccagcagtcgagcattaaccagaaatcctcaccgcatttttcacgcatatccgcgaccatagcggcatctttgcggatccccgcatcgccatcatgtggcccccagtgcgtcggcattttgccaccgataaagcccatctcttttgccagatccggacgcgcacctgtggcgtagaactgaatctcatcacgaacagcgccgcctaaaagtttataaaccggaagcccgaccactttgccgaacagatcccacagagccagatcgacacaagaaatcgtattcatcaccaggccaccagagccggagtaatacagggtggcactgagcatttgatcgtggatcagtttgatatcactgacacatttaccctcaatgaaacggttaagatgtttttcgacaataaaacagcccatttcaccggctgtcgaaacggcgaatccggtctggccgttttctgcttcgacttcaacaaccaacgtgccaagaacgttaatgccaaatgactggcgtgactgctcgtaatcgcggtatttactcatcggggtggcaatatgatcgtctatccagtgattcgccccctggtcgtgataatcaccgccgccagcgcctttttctgctgtcgcaccgccagtaaaccaggcgcgaacctgtttaatttttggtagggtcatgatgttctccattgttatgaggcttgtaagtcaaagggacttttccatcccaacagacgtgaaatatccctggcgcaggcaatggccttgcccgccagataatcacggtattcttcattgatttgtaagcgggtaccgaccaccgagatcgcagcggtaagctcgttattggcgttaaacaccggcgcagcgacacaacggacatcggcgtaatcttcgccgttgtcatagctccagccctgacggcgaatacgcgccagttcttcgtgaagttgctgtggatgagtaatcgttgtgggtgtcgcctgctcccagaccagcccttcgataatactttgctgtaccgctgcaggttgccaggcaagcaggcatttacctattccggagcgataaagcgaaaggctttttccttcatgggaacgcacgctgatagtggctgatgactccactttcaaaatgtaataagcgctgccgttatcaataatccccaggtgacataacagcccggtggtatccatcagttgcgtcaaacgcggtcgagccagttcccggagatccatcttgcttaacgcatgaccggaaagctccaccagcctggtccacaaacaaaaattttcctggtgatcaaggctaagaaaacgctgacgcctgagttcattaagcagcaaataggccgtgcttttagggattcccaatgtgtcaatgatcgtcgcagcactacaggggccaatgcgggcaatcaaattgagaatatcaatagcccgtgtcagggcgggaactttgcttgattccaacatactggactccagtcttagatactggaatcagtctcgttgctcagggggagtaaaattgtgaagcgcatcaaatcccgctcctcgtccagcagactggagaaattacgcacaaatttgtgaatcagcgcacggattttttcttattgagtacaacaggttggacaaattttgccggagggggaatgtgccggtgcagtaaaccggcacagagtggcggaatcagacagataaggtcatggactcaacaacctcaatccagccatgctcactggcgatatcctggccgtttaaccaacggcgcagcatattcagtgccatcattgcgcacacttcctgacggatagccaggctgtagcgcgtagtgctgaaacgcacacgcagagcgaaagtgccgtctggcgtggctagcgcaaagttgagatgctcgttctcgaaacccgaaacagccagtgccagcccggcaaaatggttggcccgccgttctgtaatccagtgcgcagtttgcgccagggtttcctcctgtgaaggaaccacttcacacgccagcaatggagcacctgcgcgagaaagttgcaaagccaataaaccaccggtgaattgctcgctcaacgtcaggctgaactggcggttttgcaattcgcgactgatctgcgcgggcagtccttcagtgccttcgaaaatcacgctctgtccggcaacacgtttaacatccagccacagtttttccatcgcctgttgctcgcttgccggtccggtgagtttcagttcgatgataggcattgaggagcgatagcccattgttacgcccggcggcagttgtagagtgtccaggctttgtgccagatcgctttccgaacgaccaaaagtagtcaaacgcagacaaaccggcggctgcggtaaagaaaaacgctcgcgcaggcgcggcaggatttcgtgctcgaccatcaccttaaattctgacggtacgccgggagtaaagaacatcaggcaacgattaagctgcacggcaaaaccacaggcggtgcctaccgggttattgataaattcagcactggcaggcagctccgcttgtttacggttgctcggtgccattactcgtccacgttcgtggaaatagcgttccatctctttgagccaggcttcatgcagcaccaggccttcaccttttgctgtcgcagcggcgagtgcgcttaaatcatcgctggtcggtcccagcccgccgttaacgatcagcacatcggcgtgctgactacgttcgcgaagaatggtgactaagtcatcaaggttatcccccaccgtattgcggcgagataatggcaacccctgatgaaagaaaaaatcggccagccaggcagcgttagtgtcaacgatttgcccgtgtaacacttcatccccggtggataacatttccacttttaacatggttatctcctgcttttgttatcgaatcactataacgcaaagggagataaggcgtagtaagaaactgaatggcgcgacagaatgccgcgccggaagggatcagaaactggcgttaaccccaacatacgggccgtcagccacggcgttgtcgcggttaccgtctttacccgacagattcaggtagcgataacccgcctcaatactgactggacgcataatggtgtaacgcgcgccagcattcgcttcttcataactttgaataccgctggagagcgaatccggagagtagtaatactcgccaaacaaacggaagctgttgccaattttccactgcaaaccacctcctaccgctgcggcataaccttcatcgccgtaattcgggttggtgtaaacgccttttccgccaacggtcgccattaacggcccgagaggcagattcaaccccagccccacgccagcgacatcaccgtcgtcgtcgttatgtgtccagttaccgcttaacgccaggcccgtcgtttcagtcccaaaaccgacaccaatattggtgtattctttacccgcctgaccgctgatgctcattgcattgaccgatgcagaaaccaacagcattccggccagacctgctagcgcaatttttttcattatcccctttcccacaagcaattaatcaaaattcccaaagctgcgggattgtactgcctggcacagaggattcaatgagcgaaaaaaaggatctagtcacttattgtaactaaatacttcttaaataattaaatgccgaaaaaataaacacactttatcgatacacacaaaaataataataagtacagttatcatcgcaaaagagattactgtcactttcacatatttgtgagttaccgtattctcatggtttctttttatttataaggaatatccctgtgcgacaacggactattgtatgccctttgattcaaaatgatggtgcttatttgctgtgtaaaatggccgacgatcgcggcgttttccccggtcaatgggcgatttcgggtggcggcgtggagcctggcgaacgaattgaagaggcactacgccgcgaaattcgcgaagaactgggagaacagctgcttttgacagaaatcacgccgtggaccttcagcgatgatattcgcaccaagacgtatgcagatggtcgcaaggaagagatttatatgatttacctgatttttgactgcgtttctgccaaccgagaagtgaaaataaacgaagagtttcaggactacgcgtgggtaaaacctgaagatctggtgcattatgatttgaatgtcgccacccgaaaaacgttacgtttgaaaggtcttctttaacaatgatgacagccatcactggctgtcagattgaaaatttagtggttaacgaattccccatccagataaactttgcctttttccacatgcatgactaaaccatccagataatcaggtttaaatgtcgcatcacgcttatctttagcaatatatgtcaggcaatgattatgggtaaaaataacgatatttttatcaggtgctttgctttgtaagtctttaattgcactatagatctcattaccgcattgaagaagtcgtttatctaccgtgagctttttacccgctgaaaaccaggtcgcggactgaatggtccggacggtattactggaataaagatcgaaatcagggatatcagcactaaaagcgttgcccagttcacgggcatcctgggtacctttgaccgtaatacctgttttatctgacaagcattgattggttgaacgatcgcaacgttcagcatggcgaaacaaaacgacaaccgggtgctgctgtgccagtctggccagcgttttattgtcgatacgtggcaaaccattgctactccaggcggcatgagtacccagtccggcaattgcagcgagcgccagtaaaatgatgatatatttttttgacttcaacgaagagcggcaaaaagctaacacgtaaactccacctatagacaagcgcaaccagacaattaccgtgaaattgagctacatttctggcgataattcgcagttggtgtaatattaaaaatcctacgatgtcggcaaaatgcctcaaaattttgccaaatgcaaagcctaaataagaaaaaatataaaaatttcaatatttacgtctaatattagtttcttaaggttaagttaatattctatccttaaaatttcgctccaaatggcaaaatatacacaacactctttatagcaaatataagtggacaggtattcaatggcggaaggaaaagcaatgtcagaatttttgcctttttcgcgaccagcaatgggcgtggaggaactcgctgcagttaaagaggttctcgaatccggttggatcacaaccggtccgaagaatcaggcgcttgagcaagctttttgccagttgacgggaaatcagcatgccatcgcggtcagttcagccaccgccggaatgcatatcacgctaatggcgttgaaaattggcaagggcgatgaagtgattacgccttccctgacctgggtttcaaccctcaatatgatttccttgttgggtgcaacgccggtaatggtggatgtcgaccgcgatacgctgatggtcacgcctgaagctatcgagtcagccattacgccacgcactaaagccatcattccggtgcattatgccggtgcgccagcagatattgacgccattcgcgccattggcgaacgttacggcatcgcagttatcgaagatgctgcccatgccgtcggtacgtattacaaagggcgacatattggcgcaaaaggtaccgctattttttcatttcatgccattaaaaatattacctgtgctgaaggtggcctgattgtaactgataatgaaaaccttgcccgccagctacggatgctgaaatttcacggtctgggtgtcgatgcctatgacagacaaacctggggccgtgcaccgcaggctgaagtcttaacaccgggctataagtacaatctgaccgatattaacgccgcgattgccctgacacagttagtcaaattagagcacctcaacacccgtcggcgcgaaattgcccagcaatatcagcaagcactggcagctctcccctttcagccattaagccttcccgcctggccgcacgttcacgcctggcatctgtttattattcgtgtcgatgaacaacgttgtggtatcagtcgcgatgcgttgatggaagcgttaaaagaaagaggcattggtaccgggttacatttccgcgccgctcacacacaaaaatattatcgcgagcgttttcccacgctgtcgttaccgaataccgaatggaatagcgaacgcatctgttctttgccgctgttcccggatatgactaccgccgatgccgaccatgtcatcacagcccttcagcaactcgcaggacaataagccatgtttgaaatccaccctgttaagaaagtctcggtggttattcccgtttataacgagcaggaaagcttaccggaattaatcaggcgcaccaccacagcctgtgaatcgttggggaaagagtatgagatcctgctgattgatgacggcagtagcgataattccgcgcatatgctggtcgaagcctcacaagcggagaacagccatattgtgtctattttgcttaaccgcaattacgggcaacattcagcgattatggcgggattcagtcacgttactggcgacttaattattacccttgatgccgatctccagaatccgccagaagaaatcccccgcctggtggcaaaagccgatgaaggttacgacgtggtagggactgtacgccagaaccgccaggacagctggtttcgtaaaaccgcttcgaagatgattaaccggcttattcagcgcaccactggcaaagcgatgggtgattacggttgtatgctgcgcgcctatcgccgtcatattgtcgatgcgatgttgcactgccatgaacgcagcacctttatcccgattctggcgaatatcttcgcccgccgtgccattgaaattccagtacatcatgccgagcgtgagtttggtgaatccaaatacagttttatgcgcctgattaatttgatgtacgacctggtgacctgccttaccacaacgccgctacgtatgctgagtctgctcggcagcattattgcgattggaggttttagcattgcggtgctgctggtgattttacgcctgaccttcggaccacaatgggcggcagaaggcgtctttatgctatttgccgtgctgtttacttttattggcgctcagtttatcggcatgggattactcggtgaatatatcggcaggatctacaccgatgtccgcgcccgcccccgctattttgttcagcaagttatccgtccatccagcaaggaaaatgaataatgaaaaccgtcgtttttgcctaccacgatatgggatgcctcggtattgaagccctgctggctgccggttacgaaattagcgccatttttacccatactgataatcccggtgaaaaagccttttatggttcggtggctcgtctggcggcggaaagaggcattccggtttatgcgccggataacgttaatcatccgctgtgggtggaacgcattgcccaactgtcgccagatgtgattttctctttttattatcgccatcttatttacgacgaaattttgcagctcgctcccgcaggtgcatttaatctgcatggttcgctgttaccaaaatatcgtggtcgcgcgccgctgaactgggtgctggtcaacggtgaaacggaaactggcgttacattgcaccgaatggtgaaacgtgccgatgccggggccattgtggcgcaactgcgcattgccattgcgccagacgatatcgctattacgctgcatcataaattgtgccatgccgcgcgccagctactggaacagacattacccgccattaaatacggtaatattctggaaatcgcccagcgcgaaaacgaagccacctgttttggtcgcagaacgccggatgacagtttccttgaatggcataaaccggcatccgtactgcacaacatggtacgtgccgttgccgatccgtggccgggtgccttcagctatgttggcaatcagaaattcaccgtctggtcgtcgcgtgttcatcctcatgccagcaaagcacagccggggagcgtgatttctgttgcgccactgctgattgcctgtggcgatggcgcgctggaaatcgtcaccggacaggcgggcgacggcattactatgcagggctcgcaattagcgcagacgctgggcctggtgcaaggttcacgcttgaatagccagcctgcctgcaccgcccgacgccgtacccgggtactcatcctcggggtgaatggctttattggcaaccatctgacagaacgcctgctgcgcgaagatcattatgaagtttacggtctggatattggcagcgatgcgataagccgttttctgaatcatccgcattttcactttgttgaaggcgatatcagtattcattccgaatggattgagtatcatgtcaaaaaatgtgatgtcgtcttgccgctggtggcgatagccacgccgattgaatatacccgcaacccgctgcgcgtatttgaactcgattttgaagagaatctgcgcattatccgctactgcgtgaagtaccgtaagcgaatcatcttcccgtcaacttcagaagtttatgggatgtgtagcgataaatacttcgatgaggaccattctaatttaatcgtcggcccggtgaataaaccacgctggatttattcggtatcaaaacaattacttgatcgggtgatctgggcctatggcgaaaaagagggtttacagttcaccctcttccgcccgtttaactggatgggaccacgactggataaccttaatgcagcgcgaattggcagctcccgcgctattacgcaactcattctcaatctggtagaaggttcaccgattaagctgattgatggcggaaaacaaaaacgctgctttactgatattcgcgatggtatcgaggcgttataccgcattatcgaaaatgcgggaaatcgctgcgacggtgaaattatcaacattggcaatcctgagaacgaagcgagcattgaggaactgggcgagatgctgctggcgagcttcgaaaaacatccgctgcgccatcatttcccaccgtttgcgggctttcgcgttgtcgaaagtagtagctactacggcaaaggatatcaggacgtagagcatcgtaaaccgagcatccgcaatgcccaccgctgcctggactgggagccgaaaattgatatgcaggaaaccatcgacgaaacgctggatttcttcctgcgcaccgttgatcttacggataaaccatcatgaccaaagtaggcttacgcattgatgtcgatacctttcgtggcacccgtgaaggcgtgccgcgtctgctggaaatcttgagtaagcataatattcaggccagcatttttttcagcgtcggcccggacaatatgggccgccatctctggcgactggtgaagccacagtttttgtggaagatgctgcgctcaaacgcggcatcgctttatggctgggatattttactggcaggtacggcctggccaggtaaagagattggtcatgccaatgccgatatcattcgtgaagcggctaaacatcacgaagtcggcctgcacgcctgggatcaccatgcctggcaagcccgtagcggtaactgggatcggcaaacaatgatcgacgatattgcacgcggtcttcgcactctggaagagattatcggtcaaccggtaacctgttctgccgctgcgggctggcgtgccgaccagaaggtgatcgaagcaaaagaagcgttccatttgcgctacaacagcgattgtcgtggggccatgccgttccgtccattgctcgaatcaggaaaccctggcactgcgcaaattccggtgaccttacccacctgggatgaagtgattggtcgggatgtgaaagcagaagattttaacggttggttactcaaccgcatcctgcgagataaaggcacgccggtttataccattcatgcagaagttgaaggctgcgcttatcagcataattttgtggatctcctcaaacgcgcagctcaggaaggcgtgacattttgccctttaagcgaactgttatcagagacgttgccgctcggacaagttgttcgcggaaatattgccggacgtgaaggctggctgggttgccaacaaattgcgggtagtcgctgatgaaatcggtacgttaccttatcggcctcttcgcgtttattgcctgctattacctgttaccgatcagcacgcgtctgctctggcaacccgatgaaacgcgttatgcggaaatcagtcgagaaatgctggcatccggcgactggattgagccccatctgttagggctacgttatttcgaaaaacccattgccggatactggattaacagcattgggcaatggctatttggcgcgaataactttggtgtgcgggcaggcgttatctttgcgaccctgttaactgccgcgctggtgacctggtttactctgcgcttatggcgcgataaacgtctggctctactcgccacagtaatttatctctcattgtttattgtctatgccatcggcacttatgccgtgctcgatccgtttattgcattctggctggtggcgggaatgtgcagcttctggctggcaatgcaggcacagacgtggaaaggcaaaagcgcaggatttttactgctgggaatcacctgcggcatgggggtgatgaccaaaggttttctcgcccttgccgtgccggtattaagcgtgctgccatgggtagcgacgcaaaaacgctggaaagatctctttatttacggctggctggcggttatcagttgcgtactgacggttctcccttggggactggcgatagcgcagcgggagcctaacttctggcactattttttctgggttgagcatattcaacgctttgcactggatgatgcccaacatagagctccgttctggtactacgtgccggtcatcattgccggtagcctgccgtggctgggattactccccggtgcactgtacacaggctggaaaaaccgcaagcattccgcaaccgtctatttgttgagctggacgataatgccgctgctgtttttctccgtcgctaaaggtaaattgcccacctatattctttcctgctttgcatctctggcaatgctgatggcgcattacgctttgctggcagcaaaaaataatcctctggcgctgcggattaatggctggattaacatcgcttttggcgtcactggcattattgccacatttgtggtctccccgtggggaccaatgaacacgccggtgtggcaaaccttcgagagctataaagtcttttgtgcctggtcgattttttcgctatgggcatttttcggctggtacaccttaacaaacgtcgaaaagacctggccttttgccgcgctttgcccgctggggctggcgttgctggtaggattttcaattcctgacagagttatggaaggaaaacatccgcaattttttgtcgagatgacacaagaatcacttcagccaagccgctatattcttactgatagcgtcggtgttgccgcaggtctggcatggagcctgcaacgcgatgacatcatcatgtatcgccagacaggtgagttgaaatacggccttaattatccggatgcgaaagggagatttgtcagcggtgatgagttcgcaaactggcttaatcaacatcgtcaggaggggattattactctcgtgctttcggttgaccgcgatgaagatatcaacagtctcgccattccgcccgcagatgccatcgatcgtcaggagcgtctggtgctgattcagtatcgtcccaaatgatctggctaacattagtctttgccagcttgcttagcgttgccgggcagttgtgtcagaaacaggcaacctgctttgtggcgataaacaaacggcgcaaacatatcgtgctgtggctgggactggcgctggcttgtcttggtcttgccatggtgctctggctgctggtcttgcagaacgtaccggtaggcattgcttacccgatgttaagtctgaattttgtctgggtgacgctggctgcagtaaaactgtggcacgaaccggtatcgccgcgtcactggtgtggggtggcgttcattattggcggcattgtgatcctcgggagtacggtgtaatgggcctgatgtggggattattcagcgtcattattgcctcagttgcgcaattaagcctgggttttgcggcgagtcatctgccgccgatgacgcacttatgggattttatcgcggctctgttagcttttggcctggatgcccggatactgttactcgggctgctgggttatctgctttccgttttttgttggtataaaacgcttcataaacttgcgctaagcaaagcctatgccttgctcagtatgagttatgtgctggtatggattgcttcaatggtacttcccggctgggaagggactttttcgctgaaagcactactgggagtagcctgtattatgagcgggttgatgctgattttcctgcccacgacaaaacaacgttactgagttttccctgccactttacactgccgttcccactcatcggggctataactgcttgccgagaggactttcaccgtatgcagcttttcacgattaatacaataaagcgcattctgcaaaggcgagagtaaatcccccactttcacggcgaagtcactcttcacttcggcgatcatttttatcgcgccgccagcatcgcagagcataagtacatgtctgttatcttgtttattgcagcacgattttttgaccagccattccattgcattatcctgtttgctaagagttttcacatcaatttacagattaacagataaactctttatcaacggcaatggaatggcagaaatgagaagtgaaacggagggttaattattgctgacgttgcacccactcttttagcgcctgacgtgaaattttaataccgccgtttttcagctccggcggcagagttagccagcgcaccggttgttgaaaacgggccagcttatctttcacccattcactaagatcaacgctctcgtggtcatactccatcaccgccaccggtcgatgaccaaactccttgtcggcaacggggacgataaacacctgcaaaaccgcaggatgtgcagcaattacgcgctcgacttcttccggctgaataccctctccgccactgaagaatagattgtctaaacgtccgacaatggtcagcttgccattatgcatctcaccgcgatcgcgcgtagcgtaccagccttcgtcattaaccagtgaaaccagttgcccgttacgccagtaaccttctgccatactggcagcccgcagccacacttcattattaacgattttcacttcccgacccggcagcggcgaaccaacgtctgccaggccgtcggcttctttcgcacacaccgtggaggcaaactcggtcagaccatagccgcaaaagcaacgaatcccctgctcgcgcgcctgttccgtcaactcgaccgggatagccgcgccgccaagtaacaccgctttcagggaaacggaactacggttaaccagcaaacgccagagttgtgttggcaccagtgaagcgtgagtacagcctgccagcatttgctccaatggctgtttatcacgtaccgtcatccgcgcaccagcgtataaccagcgccacataattccctgaccggagacgtgaaacagcggtaaagagagcaaccaatcatcgtgatcgccaaacggaatcagcgataacacaccttgcgcactggcaagatgggcctgataagtatggacagcggctttcggcaaaccggtagaacccgaggtcaacgtcattgagcacagacgcgtcggctgccacgtagcggcatgtgcgccttcaaccagctgaatgtgcagcgacgttaatgccggaaacgtgttttccccatccggcaccagagcaaattgcagcgtcagattgggcagcaattcttcaagcaacggttgcggcagctgagggttcacgggcaacacccgcgccccgcattgcagtaacgccagccaggcgagcagcgtttgcggcgtattccacgcccgcaacatcacgccgctgccctcaaccaccccctgcaccgcaaatccggaggctaattcatcgacgcgagcacaaagctcgcgccagttgagttgctcgtcattaagacgtaaggcgatggtttctccccgcacttgccgccagtgacgccacggccagtcagagaagatcataacaaccgctccagtgcatcaacttccacgacaggcagcgtgctacccggccagcgacgtacctgctgcgcctgcatcagatccagcgtgtccagccctggaatggtgtccggcgttaaccaggcggcaatccgcgccagttgcgttaagcctaagctcgattcaatggaagaactgatcaccgccgtcagccccagcgcgtgcgccgcctgtacctgctcgcgtactttttccagactgcccgtgagcgtgggtttgataactaccgcgcgcacgccctcttcagccacaaaggcaaaatccggctcgcgcaggctttcatcccaggcaatggcaatgccggtttcacgggcaaacgctcgcgaatcatcgcgggttttgcacggctcttcgagaaacgcgatgcggtcgcgataatccgggttaacgtatttggcaaactgctgacctttcagcggtgtccaggcgcgatttgcgtcaagacgcaaatgcagatccggaattgcctccagcaacagattcaccaccatgccgtcgcgcaccgcttcgtacaatcccactttgaccttcgccactttctcgcctggcatatctgcaagtttgaggatcagatcgtccggatcgccattacacagcggtgccgcacggtagttggctgcttgcggcaacgtatctgtcagttctgccaatgcacagcttacgccaaaggccacggaaggcatctgcggtagctcgcaatcgcctgccagccagttatttacccaggcaagcagcacactttgcgcctcttcccaggtttcctgactgaagcccggcagtggggagatctccccccacccttcgcgctcgccttcacgcaggcaaacatacagcccgtcgcgggtttttaaccgcctgtcgcgcagaaccacccccgcgtccatggggatctgccagcggtatacctgcgcgctacgcattacggattccgtttgaatttgctgaagtcaggctgacgtttctggttgaaggcgttgcgaccttcctgaccttcttccgtcatgtagaacagcatggtggcgttgcccgccagctcctgcagccccgcctgcccgtcacagtcggcgttcagtgcagctttcaggcagcgcagcgccatcgggctgttttgcagcatttcgcggcaccaacggacggtttctttttccagatccgccagcggtaccacggtgttcacaaggcccatatccagcgcctgttttgcgtcgtactgacggcacaggaaccagatttcacgcgcttttttctgcccgacgatgcgagccatgtaggaagcgccccagccgccgtcgaaggaaccgactttcgggccagtctgaccgaagatggcattatctgccgcgatagtcaggtcgcacatcatgtgcagaacgtgaccgccgccgatggagtagccagccaccatcgcgacaaccggtttcggacaggtacggatctgacgctggaagtccagcacattcaggtgatgtacgccggaatcatctttatagccgccgtaatcaccacgcactttctggtcaccaccggagcagaacgctttatcgcctgcaccagtcagaatgatcacgccgatgttgtcgtcataacgcgcatctgccagcgcctggatcatctcttttaccgtcagaggacggaaggcattgcgcacctgcggacgattaatggtgatttttgcgataccgtcggtggatttttcataacgaatgtcctcgaaaccttcggagcagtcgtgccattcaaccggtgcgtaaagcattgcttcatcaggataaatcatattgtgtcctttagtcagaaacgcaagatctgcgccagacttgcgataacgccagcgggattttcccgatgcgcgttatgtccggcgcgaggaatgacatggcagtcggcagccagttccgccgccagggcgcggaatttgctgtcacgttcaccacataaataataaaacgcaaatgtgcgggcgctaaggttagcacgtaaatcaggctggacggcgagagaagtcgcctccagcatggcggcaagcgttgcgccattattgttgctgcgcagcgccaccagctcccggcgttgatcgtcattgagtgaggcaaaaacaggctgttgataccagtcggcaaataccgccgttaacggttctgtgagaaaacgctgcacccattggcgatcggaacgctgacgttccgcacgttgttcagcattttgcagccccggatgcccgccttcgacaataaccccacaaagccccgccagcccctggcaagccgccatcatcgccacccgtccaccaagcgagtaccccaccagccagaagtcaaggatgttgtaactaaccaaggttttacgcagtaagtcggtgacatcatcaaatccatcgacgctaatcgccgccgaaccaccgtgacctgggagatcaacatacaaccgtgagtagtcggcaaacgcctcgcccacttcttgccattcgtggcaatcgccggaaaaaccgtgcaaaaacaccagccagggtaaacctggttttccgtgttttgcctgcgcgtgcaggatcataaatggcttacctgcgccagaagttgctggagcgtttgcgcaccatcggtgtcgttaaccaccatttcaatcaccgtggtggttggcgtgcgccaggcgtcggcaaatgccgtttcaagttcctgccagttttgcggacgatgatatttcagctcgaacatcgcggcggcgtgctcaaaatggacgttttgcggcatcagatagaaacgctcacgctcgctttgcggcgttggcaacagcgagaaaatttgcccgccgttgttgttcaccacaattaataccagcggcgcagaaacctgacgcaataacgccagcgcgttgagatcgtaaagtgcggagagatcgcccacaatcgccagcgtcggtttgccgcttgcccgctgaacgccggcggcggtcgaaagcagcccgtcgataccgctggccccacggttgctgtacaccgggtaacctgccggaagttgcgaaagcgcatcaatcagacgtaccaccaggctgttaccaacaaacaattgcccctgttcaggcagatagtcgcagatgcgatgcgccagttgcgcttcgccaaacgcatcacggcgggcaataaccgcctgcattgcctgttccgccaggcgcgggatttcaacgcaccagggctggcgtttttctgccggatgcagctccagccagtcggcaatattggcaattaagcgacgtccgcgatggtgtgccggatcaagtcgcccttcaatgtcatcaacaatccagtactcttctggttcacagcttgcctgccattgcaggagccgtttccccgtcaggctgcttcccagttgcaccacaatttgcgcctgctgcagctcgctggtcgctttggcattgcctaaccaaagatcggcacacggcagcggctgcccggtttgtgacagcacatcgccaatcagcggccagccaagagtttgcgcccacagggcaacttttttgccctcttccgcactcatgcgcccggcaaccaccacgccgcgcttttgtcgccagaagaaccagtcgcgctgtttttcactttccagacgaggcgcttcacgcagccacggtttgtcgtcctgccaccagtcacccagacgctgttgccagctaagcccggtatcgtccatttcgccatacagcggttcagcaaacgggcagttgatatggactccccccgcatgaagcgtaccgagagcgtggtcgatggtagaaaccagccaacgtgcggggatatcctgggtcgggcgcggcaatgaaatactgtgcgtggggtgagaggcgaacattcccggctggcgaattgcctgattcgcgccgcagtcaattagctccggcgggcgatcggcggttaagagaatcagtttttctccggttaacccggcttcaatcagtgccggatagagatttgccaccgccgtgccggaggtcacaatcaccgccaccggctgcttgctgactttcgccagccccagcgccagatgccccaacccacgctcatcgaaatgggtgtggtgaatgaatgcggaattctccgccgccgctaacgttaacggtgtagaacgcgagcctggggcgatacagatgtgtctgacgccgtgacgcgttaatgcttccagaatgaccgccgcccagcgtcggttaaatgcgcttactgacatgagtttgtccggtatcaatattgcggctaagtataaggagctacaaaaatagattattgatatgaatcggtaatgatgcgactcattactattccatttgtaataaagtacgcagccctgccgctttgttgtcgatttcctgccactcttgctcggggtcggaaccacggacaatgcccgcgccagcatataatcgcacgacattgccgctaatttttgctgagcgcagggaaacgcagaattcgctttgttgtaatgagagatagcccgcagaaccggcgtaccattctcgggtgaacggttcgtgacgggcgataaactgtcgcgccagatcgcgcggtaagccagcaactgctgccgttggctgcaactgatgtaaacagatcacatcatccgctttgttgagtgaagtccagatacagcggcgaagatgctgcactttacgcagacgcagtacctgcggcggtaaaacatccagcgtctgggtatcggcctgtaatcgttgacagatatcttccaccaccagcatgttctcgcgctggtttttatcatccgccatcagccactctcctaactgctgcgcctgcttatcatcaggattatttgctactgttcccgccagcgcttcagtacgcagcgctttgtcacgccgccgccataaccgttccggtgaagagccaagaaaagcattttcgccatcaaaggccatgtaaaaatggtagcaattcagattcagtcgacgactggcagccatcatcgccgccgcgttgaccggacttgcgaaatgcaggtcagttgcccgagcgagcaccactttgtcgagctcaccttcggcgatggttttcgttgccagttcgattaattgcgtccagcccgttttgtccggccagtgttgttctcgcgtggtggttaaatgtaacccaggcaagggcttgatactcaccagtgtggcgataaattcttttgcctgaatcgcatcgtgctgaagggagctttcgctgaatagcgtcagccgcagcgtggctttaccgccacagcgtcgccattccaggcggggtaaaagtaaattgccctgcgacgggtcaaaagcattcagcccccaaatgcgtaagtcggcgtgttccgggtgctggcgaagaaaacgttgtgcctggtccaacgacgtaaaacgggtaatcgcgcccaggacgacagcttcttcatcaccattacgttgttgccagtagaattgcgggtatgtttgctgactggccagccagctcaaggcatcaaaagcgtctttgagagggaaaggaatatcgataacccgaatgccgggtgtcgccggaatctcttgcgacaaatggcgcagtagattttccagcgccgtagtaagtgattgcacgcggacctctccctgttaaaagcctcacattatacggggtactacaaaaaaaatgcagtaccccggtgtagggaggttttaacggcgtgccagcaacagtcctagtaccagcccaacggccgcgcccacaccaattccttgccagggtttttcgtggacgtagtcatcagcacgataaactgcctgcttcgcccgatagtaataactgtctgaagcctggctaacccgttttttcacatcatccagcgctttttctgcacgcgctttcagctcaacatatttctgatcggcgggatcgccagaggagcggagcacctcttccagtgtttcactaagcagcgtcaggtcgtcatcgatacgtgtatcaccaaactgattagacattctcgttctccatttgcgtaaaacctgtcactaactatagacaagggttgttgattacgcctgaattacctcgcgtgccatcccaatgtgtgggataccatcttcttcatagacctccgtcacagggataaaaccgaaactctggtagaagttttgcagatgcgcctgcgccccgaggtaaacaggcttatcaggccagtgatgcgtacatgtttcgagtgttttactcatcagctgctgccccactttttcgccacgcaacgcttcactgacaatcacccgacctataacgaccggctcaagatcatcatcacttttcagaatcctcgcatacgccaccagttcatcatttttccaaccgagaatatggcgattatcccccgtcaaatcatcaccatcgatatcctgataagggcaattctgctcgacaacaaacaccgcgcaacgcagttgtaataaggcataaagctgggaaaccgataattcagagtgatgcagatcttgccattcaatcataatgctctccttttagatgtatgccttatactagccggaatattttttgaaacgtgatgaactcatggaattaatttttttaggtacttcagccggtgtgccaacccgcacgcgcaatgtcacggcaatattgcttaacctgcaacatccgacccagagcggactttggttgtttgactgcggtgaaggcacccagcatcagctactgcataccgcctttaaccctggaaaactggacaagatttttatcagtcaccttcatggcgatcatctttttggtttacccggcttgctgtgcagtcgttctatgtcaggcattatccaacccttaacgatttatggtccgcaaggtatccgtgaatttgtggaaaccgcgctgcggattagcggctcatggaccgattatccgctggaaattgtcgaaattggcgctggcgaaattctcgatgatggcctgcgcaaagtgaccgcttatccaatggaacacccactggaatgctatggctatcgtattgaagaacatgataaaccgggtgcattaaatgcccaggcattaaaagctgctggcgtaccgcctggcccactgtttcaggaattaaaagcgggcaaaacaatcatgctggaagatggaaggcagattaacggcgcagattacttagctgctccagtgccaggtaaagcgctcgctattttcggcgataccggcccctgcgatgccgcacttgacctggctaaaggtgtcgatgtcatggtgcacgaagcgacgctggatataaccatggaagccaaagccaatagtcgcggccatagctctacacgccaggctgcgacactagcccgtgaggctggagtcggtaagctaatcattacccacgtcagctcgcgctatgatgacaaaggttgtcagcacctgttacgtgaatgtcggtcaattttcccggcgactgaactggcgaatgatttcaccgtgtttaacgtttaactctgcttattattaaaaacagggcgaaacttgccctgttatcgcaacccgcgctacatatatccacccacacgggcatattgagcgatttttgatatttattcatctccttacgcactatattcagagcaataagttgcctctttttatcttcattcagcacaacctttgcaactaaaaggagcctatgatggttacagttgtcagcaattattgtcaattatctcaaacccaactcagtcagacatttgcagaaaaatttactgtgaccgaggaattactgcagtctttaaaaaaaacagcgttatccggggatgaagaaagtattgagttactgcataacattgcgttaggttatgatgaatttggaaaaaaagctgaagatattctttaccatattgttagaaacccaacaaatgagaccctatcgattatccgacttattaaaaatgcctgtttaaaattatataatttggcacataccgcaaccaactccccccttaaaccaactgctccggataattcagatgatctcctgttcaaaaagctgtcctccccttcgaaattaatgacaattatcggtgatgaaattcctcttatatctgaaaaacagtcgctttcgaaggtgcttttaaatgatgagaataatgaattgagtgatgggacaaacttctgggataaaaatcgtcaattaaccacagatgaaatagattgctatcttcagaagatcgccgctaatgcaaaaaatactgaagtcaattatcctactggtttctacctctccaattccaacagcacttacctagaaatcgctctcaatgacaatattaagagcgatccatcatggccgaaagaagtccagttattccccataaatactggcggacactggatattagtttcgctacagaaaatagtaaatgaaaaaaataatacacaacaaataaaatgcgtcatattcaactcattgcgtgcactaggccatgataaagaaaattcacttaagcgtattattaatagtttcaattctgaactcatgggagaaatgtcgaataataatataaaagttcatttaactgaacccgagataatatttttacatgccgatcttcagcaatatttaagccaaagttgcggtgcatttgtgtgcatggcagcccaggaagtgattgaacaaagggaaagcaattctgacagcgccccctatacgttattaaaaaactatgctgacagatttaaaaaatattcagcagaagagcagtacgaaattgattttcaacatcgacaggtaaacagaaattgttatttagataaatatggcgatgcaaatatcaatgattattatagagacttagaaataaaacactcacaaccccaaaatagagcatcaggcaaaagagtaagttaacatcatagttaattaattcgaccagtcagcaaatatgctgactggtcgaacatagtttgctaaaaagtcatcactgactgatgtcagtcacaccatccgccagttcaatctacgggtatttccagcgtatatcggcacgcgattgctggtctgttgatgtagtggattgtagttgctgacttttcttaccctcagatttctgccccacttgtcaattcaatctgccaataaataacataattatatgtttcctcatagaaattcctttttaaaaatagcgaccccactgtaaaagatactttttgtatatctctaccaagcgtaataaaacaaacgctcataactcattataaataatgataaattaacgccttttattgataatttacaaatgaaaaaattttccttttgttatattatttctgttttcactccctctgattattttttaccaaccctgggtcactgcattatcgccaacgccccgacacgtaagtcctgagcaattagaaaaaacagttcgttatcttacacaaactgtgcatccacgtaatgccggcaatattgataatctgaataggtccgtagagtatataaaagagttctttgtcagtagcggtgccagagttaccgcgcagggcgtccccggttggctattacgactctgcgcctggtagccaggattacccttacccggcaatgtcctggctttatcccgatcggggagactttattgccgtggtcggcagaatgcaggatatcaacgccgttcgtcaggtaaaagcggcattgttgtcatcccgggatttatctgtttattctatgaatgccccagggtttattcccggtattgatttctctgaccacctgaattattggcaacacgatattcccgccgtaatgattactgacaccgctttttatcgtaataaacaataccacttgcccggtgatacagcagacagattgaattatcagaaaatggctcaggtagtggatggtgttataaccttgttatacaacagtaaataataaaaatttctcgaggcgggtccagaaacagcgacatgtacattttattttccctcgtctgttttaagatgcgaaacataaaattcaatggaggaaaaataaatgggaatgattggttattttgcagaaattgactcagaaaagattaaccaactgcttgagtctactgaaaaacctttgatggataatatacatgacacgctttcaggattacgccgactggatattgataaacgctgggattttttacactttgggctgacaggcacctctgcttttgatcccgcgaagaatgatccgctgagtcgtgccgtgcttggtgaacacagcctcgaagatggcatagatggcttcctgggattgacctggaatcaggagttagccgcgacaatcgaccgactggaatcactggatcgaagtgagctgcgtaaacagttttccattaagcgactcaatgaaatggagatttatccgggagtgaccttttcagaagagttagaggggcaactctttgcctcgatcatgcttgatatggaaaagctgattagcgcgtatcgacgtatgctgcgacaagggaatcatgcgctgacggttattgttgggtgatggtgtcagagcgccaaaaaaaaaccgccgagcatgtcggcggctttctgacttacaaactaacagattacatcagcggcattgccaaacgcacaatactaatcagcggttgtggccatacacccagcaccagtaccaacagtgcagaaatcagcaccacgataccgcccgcgctgtactgccagtttgacggtgcatcgcgacccggttgttccggtgcgtgcaggtacaggctcaccgccacgcgcaggtagtagtagaggccgattgccgaaccgacaaccacggcacccaccagccaccacaagtgtgcctggacaccgaccgccagcacgtagaacttaccgataaagcccagcgtcatcgggataccggccagagacagcatcatcaccgtcatcactgccgcgaggatcggacgatgccagaacagaccgcggtaagagaacagggaatcagcatccgggccacgatacgggctggacatcaggctgaccacgccgaacgcgccgaggctgctgaacagataaccggccaggtaaacccctaccgcttccatcgacatctcgcctgtttgcagcgcaatcagcgccaccagcagatagccgaggtgagagatagatgagtaaccgagcagacgtttgatgttggtctggctcaacgccatcaggttaccgaagatgatggaggcaaaggcgataatcgccagcaccacgcgaatcgcttcgctgtcacccaccggtgcgtagaggaacagacgcatcaccacaccgaagatagcgattttgctcgccgtcgccaggaaagtggaaaccggcgcaggcgcgccctggtatacgtctggcgtccacaggtggaacggcaccagagagagtttgaagccgaggccaacaatcatcaggccgaaacctgccagcaacagcggctcgttgagcataccgtcgccaaggtttttacccaacgcgacaaacgacaggtcgccagactgcgcatacaccagcgccataccaaacagcaggaaagaagacgctgcggcagaaaggatggtgtatttgatactggcttccagtgaacgtttctggcggaaagcgtaaccgaccaggccaaacagcggcaaagagatcagttcgataccgaggaacagagacgccagatggttggcattcgccagcaggatcccgcccagcgcggcaattaacaccaacaggtagaactcatccttgttgtcgttatagccttcaagccacgggtaggcgaaagtacaggtggcgaggctcgccaacaataccagcccggtgtaaagcatggcgaaaccatcaacgcgcatcagcggcgtaacgtccatagcgcccgcctggccaacaaaccagagcgaaaccagcgccgcgttaagcccaataaccgagagcgtagcgttgaggaaatgattgcgtcgccacgcaatggagagcatcacaaccaccaccgtcaagccgacgatcagcaacggtagcagtgcgatcaggttttgtggagttattgtcatggcgatttacggccttgtagtagtaacggaattaacaaaccactgctggatattgccaatcgcggagtgcgaggtatccagaatcggctgcggatagaagcccagcagtaccagcagcaccaccagcaacaggatcataaacagctcacgcagcgacatccctggcagttcctggctggcaatctggcttttcgctttaccgaagtaagcgcgatgtaacatcgccagcgaataaacagatgcaaagaccagcccaaaggtagagataacggtaatcaccggtacaacctggaagctgccgaacagaatcataaattcgccgacgaagttaccggtgccaggcatcccaagcgttgccaccgcaaagaacagcgacagtgctggcagccatttcatcttgctccacagaccgcccatcatgcgcatgtcgcgggtatggatacgttcataaagctgaccacaaagaataaacagacccgccgccgacaaaccgtgcgcaatcatctggattaccgcgccctggtaggccaactggctgccggtgtagatagcaatcagcacgaagcccatgtgggaaaccgaggtgtaggcgatcagacgtttgatatcggtctgggcgaaggccatccacgcaccgtagaagatgccgataacacccagccacatagcaattggcgcgaactctgccgacgcgttcgggaacagcggcagggagaaacgcagcaaaccgtaagcggcagttttcagcaagatccccgcgaggtcaacggaaccggcggtcggagcctgggagtgcgcatccggcagccagccatgcagcggaaccaccggcattttgactgcgaaggcgatgaagaagcccagcattaacaggtattccacaccactggacattggcgtattcagcagctcttcatagttgaaggtccagacgccggtcgcattgtagtgaacaaaaaccagcgccaggatggcaatcaacatcaccaggccactcgcctgggtgtaaatgaagaacttggttgccgccgtgatacgcgttttaccgtcagaggctttatgcccccacagtgcgatcaggaagtacatcggcaccagcatcatttcccagaagaagaagaacaggaacatgtcgatggcaaggaacacgccgataacgccgcccaggatccacatcaggttgaggtggaagaagccctgatatttttcgatctctttccacgaacatagtaccgccagcacaccgagcagaccggtcagcacgaccatcagcagcgacagcccgtcaatggcgagatgaatagagataccaaaacgcgggatccacggcatgtcgaattcagactgccactgcggaattccggcggattgcgtcagtgaataaccgccctgcaaccacagttgcagcgacagcgccagcgtcaatcccatggtgatcagcgcgatccagcgtggcaccttgacgccaaagcgttcggtctgccagcacaggaagccgccaataaagggaattaatattagccagggtagtaacatggcgatctttattccttgtaaaagtcccgtcaggaccggattttcaacgaattctcacgacagaaaattctcttcggactgggggtagtgtcggatgcaccgcgaaggcggcttatccgacctacgttcttatatgcccaggggcaatcccacaatccttaactcaacgcagtaccatcaacagtgccagcaccacgaccgcaccgatgctcatggatgccacataccagcgcagatagccgttctcacttaacagcagacctttacctgcaaagcgggaaaggacagccgggatgttcatcattgagttcagcggatcgcgtttcagcaaccaggcaatacccaggaacggcttgacgaacactttgtcatacagccagtcaaatccccaggcgttgtaccaccaggtgcccagcagacggcccggcgcactgttggcgatggaggtcaccagagtacgtttacccagccacagccaggctgccagcagaatgccgaccaccgcgaccacgccagaggtaatttccagggtcaacatgctgccgtgcgccagttccgtcgtttgcggaagcacgccctgcagcggcggtacaatcagtgcgccaacgaaggtggaaaggatcagcagcacaatcagcggcaggctgtgagttacccctttcacggcgtgagcgtgaatttgttcttttccgtggaagacgatgaaaatcatacggaaggtgtagagcgaggtcataaacgcaccgaccagacctgccaccatcagattgatatgaccattcgccatcgcacccgcgaggatctcatccttactgaagaagcccgcagtgaccagcggtagtgccgacagtgctgcgccgcccaccaggaagcagagataaaccagcggaatagatttacgcagaccgcccatcttgaagatgttctgttcgtgatggcaggccagaatgacggaaccggatgccaggaacagcagcgctttaaagaacgcgtgggtcatcaagtggaaaatcgccgcatcccatgcctgcacgccaagcgcgaggaacatgtagccaatctggctcatggtagagtaagcgagaacacgtttgatgtcggtctgtaccagcgcggcaaaaccggccagcagcagcgtaaccgccccgacaatacccaccagatgcagaacttccggcgtcatcaggaacaggccgtgggtacgggcgatcaggtagacacccgcggttaccatggttgcggcgtggatcagcgcggagacaggcgtcgggcccgccatcgcgtcggcaagccatgtctgcaacggcaactgcgcagatttaccgaccgcaccgcccagcagcatcagcgtcgcccacatcagcatgttattgccgtcagcaaagtgcgctggtgccagttccaccatttcgcggaagttcagggtgcccagttcgttgtaaagaatgaacagtgcgaaagcgaggaacacgtcacccacacgggtcacgacgaacgctttcattgccgctgcgccattcttcggatcggtgtaatagaacccgatcagcagataggagcacaggcccacgccttcccagccgaggtacatcagcagcaggttgtcggcaagcaccagaaccaccatgctggcgatgaacaggttggtgtaagcgaagaagcgagagtagccctcttcaccgcgcatataccaagaggcgtacatgtgaataaggaaacccacaccagtgaccaccgagagcatggtcagcgacaggccgtccagcaccaggttaaaaccgatgttaaagtcgcctaccgacatccacgtccatagcggctggctgtatgtctgctcgccgttagcgaagaaatcaacgccgataaaggcggttaccagcgccgccaggcccacagagcctacgccgacgatcgccgagacgttttcagaccagcgcccacgggagaatgccagcaggacgaagccaatcaatggcaaaataatggttaaggcaagcatgttcatccgcgcatctcacttactgaatcgatgttcaggttctggcgacgacggtgaagttgcagcagcagcgcaaggccgatactcgcttctgccgccgcgaggctgatggcgagaatgtacatcacctgaccgtcggtctggccccagtagcttccggcgaccacgaaggccagcgcggaggcgttaatcatgatttccagaccaatcaacataaacagcagattgcgacggataaccagaccggttaagccaagaacgaataagattgccgcgaggatcagtccatgttgtaaggggatcatgcgtgctcctccgtttttcttttcgcgctgtcgtctttacgattgctcagcacttcacccgcacgctcttcacgaccgacgtggaaggccacaaccagacctgcgagcagcagcatagaagccagttccaccgccagtacgtaaggcccgaacagcgtaatacccactgctttagcactgattggcgtaccgtcgataccctgatcgttaacaccgaggatggcgtaaacaatcaccaccagcatgatggccgacaaaattgccggaccaatccacacctgcggtttcagccactggcgttcctgttcgatttctgaaccgcccaggttgagcatcatcaccacgaacacgaacagcaccataatggcacccgcgtagacgataatttccagcgcaccggcgaagtaagcgcccagtgagaagaacaccccggaaatcgccagcagcgaaataatcaggtacagcagtgcgtgtaccggattggtatgggtgatcactcgcaaggtcgcaagtatggctatcaggccacagatataaaaagcgaactccattgcccctctccttacggtaacaggctcttgacgtcgataggcttggcttcgttctctgcttcgcccttatctttgccgtcgattgccatacctgccatccggtagaagttatattccgggtatttgcccggaccggagatcagcagatcctctttctcgtaaaccagatcctggcgcttgtattcccccatttcgaaatccggggttaactgaatcgccgtggtcggacaggcttcttcgcacagaccacagaaaatgcagcgtgagaagttgatgcggaaaaattccgggtaccagcgaccgtctttggtttctgctttttgcagcgagatacagccgaccgggcaggctaccgcgcagaggttacaggctacgcaacgctcttcgccgtccgggtcgcgggtcagaacgatacgaccacgataacggggcggcagatagaccggctcttccgggtacattcgcgtttcgcgtttggcgaacgcgtgcaggccgatcatccagatactacgaacctgggtgccgaaacctactaacaattcttttaaggtcatggtcttattgccccttattgcgcctgccagagaatgacagccgccgttaccagcaagttgatcagcgtcagcggcaggcagattttccagccgaaggacattacctggtcataacgcggacgcggtaacgacgcacgaatcaaaatgaacatcatcataaagaacgcggttttcagcgcgaaccagatgaatggcggtaacaacgggccttgccagccaccgaagaacagcgtcaccatcaatgcagagatggtcacaatcccgatgtactcacccacgaagaacagaccgaacttcataccggaatattcaatgtggtaaccatccgccagttcctgctcggcttccggctggtcaaacgggtgacggtgacataccgccacgcccgcgatggcaaaggtaataaaaccaaagaattgcgggataacgttccacacatgcgcctggctgttgacgatgtcggtcatgttgaatgaaccggcctgcgccaccacgcccatcaaggaaagcccgaggaacacttcgtagctcagggtctgcgcagaagcacgcatcgcacccagcaacgagtatttgttgttacttgaccagcccgcaaacagcaccgcgtaaaccgccagacctgccatcatcaggaagaacaaaatcccgatgttcaggtcggcaaccacccaacccggactgactggcacaatcgcaaaggccagcagcagcgaggtaaaggcaatcatcggtgccagggtaaagatgacgcgatccgagaatttcgggatccagtcttctttaaagaacattttgatcatgtccgcaaccagctggagcgaaccgccccagccaacacggttaggtccgtaacggttctggaacagacccagcaggcgacgttcgccaaagctcatgaatgccccgcaggtgacaaccaccagcaggatcaccaccgctttgaggatggtcagcaggatctcaatcagttccggtgatatccaactcattgttgtgcctccttgagatcctcaagatgcgcgccagccagcaccggagcaatgccggacatacccatcggcaagcccacctgccctgccgtcagtccttcggcgatttcaaccggcagcgtgaccgtgttgccatcgtaactaaaggagacgcgtgtacctgcgttcacacccaacttcgcggcatccgctgggttgagtttgatgtacggctgcggcatacggctctggaagaccggagcacgctgtgacaattcatcgctgccaaacaggtggtaatacggcgcgatacgccatttcccgtcctgcggctggaagcgtgccggtacgctggtgaagtaatccagaccattttcgctggtttcaaacagacgcacgcccggatcgccaaagcgcagtttgccgcccacttcgtcctggaatttgttccacgcctgcggggagttccagcccggcgcccaggcaaacggcacttgcgaacggtgcgcagtcggctggttgttaccttccatcgagaaggtgaacatggtgtcaatatcctgcggctgacgcggctcatgaacgctgatattggcgcgcatggcggtacgaccgctgtaacggtgcggttcacgggccagtttctgcccacgaatacggaatgtcgcatccggcgcagcatctttgatacctgccagttccgggattttcgccacaacagcgtcaatcacatggtcgagctgcgtccagtccacttcacggctcagcagggtgctgtgcagcgagtgtaaccagcgccagctttccagcatgacagttttgctgtcgtaataagcaggatcgtaaacctggaagaaacgttgggcgcggccttcgttgttgatcaccgtaccgtcgctttcagcaaagctggcagcagaaagtaccagatgggcgttttccataatcgctgtgcgttgatgatcaaccaccatcaccagcggtgctttagccagcgcagcattcacgcggatagcagaagcgtgacgatgcagatcgttttccaacaccaccaccgcgtcggcgcgtccggtttccagttcggttaacgcttcttcaagcgaaccgccacccataatgcccagccccatgctgttgacggaacgggcaatcatggtgataccgacctcagcgccgcgacctttcagggctttcgcgacgttagccgccgcctgaatcacctctaagctaccggcgttcgtcccggagataatcaacggtttcttcgcacctgccagtgcctgcacgatgacgtcgattttgctttgcagctcaggttcgataccgtcaaccgctggtgcagagttatccagcgcatgggcgatggcaaaacctaaacgcgcctgatcttcaaccggtgcgcggtaagtccacgccgcgatatcatccagacgggtgtcatcaacgttggtaacaaacagcggatgcttcgcacgttgaccgatgttgaggattgccgcaatctgccagtcagccactttctgtgctgccgccatttcgcgcgctttacctttcacagcctgacgcactgccagcgcgacgcgcgcgccggtctgggtaacgtcttcgcccagcaccaataccgcatcgtaagattcgatttcgcgcagagccggagtataaatgccgccttcacgcagcactttcagcgccagttgcagacgttcctgctcaccgtgagcgataccggtgtagaagttttcttcgcccaccagttcacgcagcgcaaagttgctttccacgctggcacgcggagaaccaataccgatcactttcttcgactgacgcagaatatctgccgcgccctgcattgcctgttcggcgttgagggtaatgaaatcatcgccacgacgctgtactggctgacgcggacgatccttcaggttgacgtaaccgtaaccgaaacgaccacggtcgcagaggaagtagtggtttaccgtaccgttgtaacggttttcgatacgacgcagttcgccgtaacgttcaccggggctgatgttacagccgatggaacattgctggcagatgctcggcgcaaactgcatatcccatttacggttgtaacgctcggagtgcgttttgtcggtaaatacgccggtcgggcaaatttcgaccaggttaccggaaaattcgctttccagcgtgccgtcttccgggcgaccgaagtagacgttgtcgtgcgcaccgtaaacgcccagatctgtaccgtcagcgtaatctttgtagtaacgcacacagcggtagcaggcgatgcagcggttcatttcgtgagagatgaatggccccaaatcctgattacggtgggtacgtttggtgaaacggtagcgacggaagctgtgtccggtcatcacagtcatatcctgaagatggcagttaccgccctcttcacataccggacagtcgtgcgggtggttggtcatcaaccactcgaccacgctttcacggaactgtttcgcttcttcgtcgtcaatggaaataaaggtgccatcggaagccggtgtcatacaggacatcaccaggcgaccacgcgtgtcttccgcgttttggtattgcttcaccgcacactggcggcaagcaccgacacttcccagcgccggatgccagcaaaagtaaggaatatcaaggcccagagacagacaagcttccagcaggttgtccgctccgttgacctcgtattctttgccgtctacatgaattgtagccattagcatgcttccagttttctcagtcagagactgagcgttaatcgaaattcggttaccagcgctctttcagcaggttcggctgaatcccattaatcaaatgggtattgctgaacggctgtttgattcccgcctcaaattcttcgcggaaatatttgatggcgctctgtaacggctccactgcaccaggtgcgtgggcacagaaagttttacccgggcctaagaatcgacacagttgctcaagtgtttcgatatcgcccggctgaccttcaccacgctccagcgcacgcagaattttcacgctccacggcagaccgtcgcggcacggcgtacaccagccgcaggactcacgggcgaaaaactcttccaggttacgcaccagcgacaccatgttgatctcatggtcaaccgccatcgccagcgccgtacccagacggctgcccgctttaccgatactttcgaattccatcggcagatcaaggtgcgcttcggtcaggaagtcagtccccgcgccgcctggctgccaggctttaaatttcagaccatcacgcataccaccggcgtaatcttcgaggatctcgcgtgcggtggtgccgaacggcagttcccacagtcccggatttttcacccgaccggagaagcccatcagcttggtgccagcatctttacttttcgagatgttctgataccactccacgccgttagcgaggatcgccggaacgttacacagggtttcgacgttgttgacacaggtcggtttgccccatacgccggaggttgccgggaaggggggtttcgagcgtgggttagcacgacgcccttccagggagttgattaacgctgtttcttccccgcagatgtagcgccctgccccggtatggacgaacagttcgaagtcgaaacctgttcccataatgtttttgccaagcagacccgcttcggtggcttcggcaatggcacggcgcagattaactgccgcttcgatatattcgccacgcaggaagatgtagccacggtaagctttcagcgcaaacgcggagatgagcataccttccaccagcaggtgcggcagttgctccatcaacaggcggtctttataggtgcccggctccatttcatcggcattacacagcaggtaacggatgttcatggattcgtctttcggcatcaggctccatttcaggccagtcgagaagcccgcgccgccgcgccctttcagaccagcgtcttttacctgattaacgatttcgtccggagacagcccggtcagcgccttacgcgcgccttcgtaaccgtttttgctgcggtattcgtccagccacactggctgtttgtcatcgcgcagacgccaggtcagcggatgcgtttcgggagtacggataatgtttttcatttataccgctccagcagttcagggatcgcttccggggtcagatgcgcgtgagtgtcctcatcgatcatcatgtttggccctttatcacagttccccaggcagcaagttggcagcagcgtaaagcggccatcaaatgtcgtttgccctggtttgatgttcagctttttctcgagcgccgcctgaataccctgataaccgttgatatgacagaccacgctgtcacaataacggatcacatggcgaccaaccggctggcggaagatctgactgtagaacgttgccacaccttcgacgtcgcttgccggaatacccagcacatcggcgatcgcgtggatcgcaccatccggcacccagccacgctgcttctgaacgattttcagcgcttcaatggacgccgcacgcgggtcttcgtagtggtgcatctcgtgctcgatcgcttcacgctctgccgcactcagctcaaaagcctcggtttgtggttgttgattctcgtgcataattagcggtccacatctgacataacaaaatcgatactgcccagataaacaatcaggtcagacaccaggctgccgcggatcgccgccggaatttgctgcaaatgcgcaaagctcggggtacgaacacgggtgcggtaactcatggtgctgccgtcgctggtcaggtagtaactgttgatccctttggtcgcctcaatcatctggaaagattcattggcaggcatcaccggaccccacgacacttgcaggaagtgggtgatcagggtttcgatatgttgcagcgtgcgctctttcggcggcggcgtggtcagcgggtgatccgctttgaacgggccttccggcatgttgttgaggcactgctcaagaatgcgcagactctggcgcagctcttccactttaagcattacgcgggtgtagcagtcagaaacgccaccacccaccgggatttcaaagtcgaagttttcatagccagaataaggacgcgccttacgcacgtcgaagtcgatcccggtagcacgcaggcccgcgccagtggtgccccactccagcgcctctttcgcgccataggcggcaacgccctgggaacgacctttcagaatggtgttttgcagcgccgctttctcgtaagacgccagacgtttcggcatccagtcgaggaactcacgcagcaggcgatcccagccgcgcggcaggtcgtgcgctacgccgccaatacggaaccacgccgggtgcatacggaaaccagtgattgcttccaccagatcgtaaattttctgacgatcggtaaaggcgaagaacactggcgtcattgcgccgacgtcctgaataaaggtcgagatatacagcaggtgactgttgatgcggaacagttcggagagcataacgcgaatgacgttaacgcgatccggcacggtgatcccggccagtttctctaccgccagcacgtaaggcatttcgttaacgcagccgccgaggtattcgatacggtcagtatacggaatgtagctgtgccaggactggcgttcgcccattttctccgcaccacggtggtggtaaccgatgtctggtacgcagtcgacaatctcttcgccatcgagttgcaaaacgatacggaaagccccgtgcgccgacgggtggttcggaccgaggttgaggaacatgaagtcctcgttttcggtgccgcgcttcatcccccactcttccggtttgaaggtcagggcttccatctccagatcctgtttggctttggtcagctcaaacggcgagaattcggtagcgcgcgccggataatctttacgcagcgggtgacctttccaggtttgcggcatcatgatgcgtcgcaggttcgggtgaccgtcgaaagtaatgccaaacagatcccaggtttcacgctcataccagttagcgttcgggaacagtttggtgaaggtcggtacgtgcaggtcgttttctgccagcgccaccttcagcatgatgtcgcggttacgatcgatagaaatcagatggtagaaaacggaaaaatccgcggcaggtaacccttcgcggtgtgtgcgcagacgttcgtccatgccgtgtaagtcaaacagcatgacgtaaggtttcggcagtttctttaagaaatcgccaacttccagtaattgttcacgcttgatccacacaacgggaaccccggtgcgagtcgcctgaacagtaaaggcatccggcccaaaacggttgcgcagttcgccaatcaccggatcatcaagatgatcgcgggtctgccaggcgggttcttgcgcggttaagtcggtcatattgttcaccattgcaaatggtccgtggtgactgtcggcgcagtaagcttcgcgaaatagatttaggaataagcgaagaaaaatccctttgccgacaggcgcaaattaaatctcgtcaggtgtacgcaggttagttacggcaatgcgttcaccgcgcttgcgttcgcgctctgattgcatattggcgcgataaacgccctgatcgccaaccacccaggagagcggacgacgttctttgccgatagattcctgcaacagcatcagtgcctgcatgtacgcttcaggacgcggcgggcagcccgggatatacacatcaaccggaatgaatttatcgacgccctgcacaacggaataaatatcgtacataccaccagagttggcacaggcacccattgagataacccattttggttccagcatctggtcatacagacgctgaataaccggtgccattttggtaaagcaggttcctgcaaccaccatcaggtcagcctgacgcggcgaagcacgcaatacttctgcgccaaaacgcgccacgtcatgcaccgcggtaaacgaagtcaccatctcaacgtaacagcaggaaagaccgaagttatacggccaaattgagtttttacgaccccagttaaccatgtcattgagcttgcccataaacacgtttttgttaacttcttgctccagagggtcggttacgatctcctgcttttgcagggggtaacggtcgttctcaccgttgggatctatgcgggtgagcgtataatccatcttaatgcctcgcggttagcgttgacgattagcgatactgttcgtttccgggttcatacgctcgcggcgtgaacgcgcgggcgtccagtccagcgcgccaatacgcaccagataaaccagacctgccagtaacacaaaaataaaaattgcagcttccacaaagcctacccagccgctttcgcggatagaggttgaccatgcgaacagatacagcgcttcaacgtcgaagataacgaagaacatggccaccagataaaacttggcggacaggcgtaagcgggcggagccgaccgagtcgataccggattcaaacggcacgtttttcgacctcgcgcgtgcgcgaccgcctaaaaaccaaccgcctaccagcatcaggcaacacaggccaatggcaacgataagaaagatagcgaatgcccagtgatgagcgatgacttcagtggatgttgacatactcattgcttactcatcaaaagtagcgccagattcactgctcttcacggcagatggacgccacatcgattcatggggaggaataaaaaaaaccttacaatcactgtagaaattcttttatacagctaattgatgtggtcttttactcctttctataaccttttgtcaactttaacaaaagtttcttcacattagtttacataatatcaacaccattagcatttaatgccctttcaccccagatccttgacgactccaggataattagatgttgttgaatcgtgtccgttgtgaagcaatggaaaaaatacgggtctattttgacaggaatttgtgtcgattcctccccccaaaagagagtattttcttgatctgtgacacgcttttgtcattccataacaaaaacgcagcaacaaatttacgtattttttaacatcattgtagcaggtgatttttttcaggcgattatttgtgcgttcgggacgtgaatctctggtgattgaaaaatgaacagttttgtgcgttctgcactatgcgaggaaggatttttactaaaaaaaagccgctggggtttaaaacacccccagcggctcgttttttacactattgtctcaggaattatctatcgtccgtcgattactcgatatccctttcaatcaacaatgaatcatccccttccggagcagacattgggctgtattgccacggattatggtagctctccatcgcctgatagatcacctgggccagctcattattactggacgggtcatagcacagcaaatattcggtatcaggtagcggcggtaagccatctactccactcagcacacgcaggtccgggctcatcatttcaaccggccttgccgtcacgccaagaccggctttcactgccgcacgaacggccggaagcgtcgaggcgacataagccagtcgccatggaatatctgctttattaagcgtcgccagcaccatatcgcgaaacggacttggatcatccagcaatacaagagggatcggctcacctttttgcaatacgtattccgctgcgcagtaccagtgtgttggcgaggtacgcaggttcaatgccttaaaggtagaaggacgatgggtggttaccatcaaatccacttcctgggattccagcatttctgccatataggcattacgtttaacgcggacatccagcgctaatttcggataaaccgaactcacgcgatttaacaggaaaggtaagatcgtatcggcagattcatctgaagcaccgatagttaacacgccctgaagattactgaacattaatgatgagcaggcctcatcattaaaacgcaggattttcctggcgtaaccaagaagttgaatgccatgttcagttaacagtttgttgcgaccgtgacgagcgaacagttctttcccaacgagttgttccagacgctgcatttgctgacttacggcggactgagtacgacacacagcggcagctgcggcagcaaaagtgttcagatcggcaacagcaacaaatgttctcagcagatcgaggtcgaggttaattatcggacgatttgcacttatcatatattatcacttactggcggctcatactgagctggttaatgctgtgcacacacaaacaagcaattccatttgtaatgtgcctccctggcagtttcatccggaacccggacgaaagtaaaaatgcatatgagttgcactaaaaaagcgactcacattgttccgttataatgcctgaagtagatcacagaatatatcttcagggatcgcatatctattaagttactcactcttttctatttatgacatgcgcgtgtttgtataaatgtaaatgtgagtccttgttccactctcgtgcagcatcgctggtcatacgcgaacacgtacaaacagcaatggtgaggcggcatcaagagcagggatccgtcatttatgcgagcattttaccccaaaaaccttttatttataagggtcattgcgaattatctgatgcaaagttatgttaggcaaagtaatcttctattattaataagcacatcaaaacctttttgaatattaaataataattaattagcatcatcctcattcattaattccgcttaacaatagtttcacaccttgcccccattacgacacctcggaaatcatcacgctgttaaactctccgtaatgcggaaatatcatcatcgcgtttcattagtgaattcttaaatgaggcattttcacacaattatcttacagataaaaaaaccagacttacaattaagaatcagaacaattcactatataacattgcatgtaaagcatatacacctcattattttgtcattattaagttattaacagcacaatcgagccttcccctctggcaaaatcttattctgcagaccttcaaaacaccgtcctgggggagtacattgttctaagctgacttccacggcagggagtggcgataacagcaaaaaaggtcaagattcatgtcccccattgaaaaatccagcaaattagagaatgtctgttatgacatccgtggtccggtgctgaaagaagcaaaacgcctggaagaagaaggtaacaaggtactgaaactgaacatcggcaacccagccccgttcggttttgacgcgccagatgaaatcctcgttgacgtgatacgcaacctgcctaccgctcaagggtattgcgattccaaaggtctttactccgcgcgtaaagccatcatgcagcactaccaggctcgtggcatgcgtgatgttaccgtggaagatatttacatcggcaatggtgtatcggagcttatcgttcaggcaatgcaggcattgctgaacagcggggacgaaatgttggttcctgcaccagattacccactatggaccgcggcggtttcgctttccagcggtaaagcggtgcattatctttgcgatgaatcctctgactggttcccggacctcgatgatattcgcgctaaaattacgcctcgtacgcgtgggatcgttattatcaacccaaataacccaaccggcgcggtatattccaaagagcttttaatggagattgtggagattgcacgtcagcataatctcattatcttcgccgatgaaatttatgacaaaattctctacgacgacgctgagcatcactcaattgcaccgctggcacctgacctgctgaccattacctttaacggactgtcgaaaacgtaccgcgttgcaggcttccgtcaggggtggatggtgttgaacgggccgaaaaaacacgccaaaggctacatcgaaggtctggaaatgctggcttcaatgcgcctgtgtgctaacgttcctgcgcaacacgccattcagaccgcgctaggtggttatcagagcatcagtgaatttattacccctggcggtcgtctttatgagcagcgtaaccgcgcgtgggaactgatcaacgatattccgggcgtttcctgcgtgaaacctcgtggtgcgctgtatatgttcccgaaaatcgacgccaaacgctttaacattcacgacgatcagaaaatggtgctggatttcctgttgcaggaaaaagttctgttggtgcaagggacggcattcaactggccgtggccggatcacttccgcattgtcacgctaccgcgtgtcgatgatatcgagctgtctttgagcaagttcgcgcgtttcctttctggttatcatcagctgtaatcttaatttcactgccggagattgcatccggcagcgttatcccgccacaatgacctgatgatgtcatcatacgtaaggtcactatgaaacagagccatttttttgcccatctctcccgcctgaaactcattaaccgctggccgctcatgcgcaacgtgcggacggaaaatgtgtccgaacacagtttgcaggtagcgatggtcgcccatgcgctggcagctatcaataatcgaaaatttggcggtaatgtcaacgccgaacgtatcgctttactggcgatgtaccacgatgcctcagaagtgctcaccggcgatctccctactccggtgaaatacttcaattcgcaaatcgctcaggagtacaaggctattgaaaaaatcgctcagcaaaaactggtcgatatggttccggaagagctgcgggatatctttgcgccgttaattgacgagcatgcatatagcgatgaagaaaaatcgctggtgaaacaggcagatgcactgtgtgcatatctgaaatgtctggaagaactcgcggccggaaataatgaattcttgctggcaaaaacgcgactggaagcgacgcttgaagcgcgtcgcagccaggagatggactacttcatggaaatatttgttcccagcttccatctttcgctcgatgagattagccaggattcaccgctgtaagcagccggagtctgcgtcgcatcaggcaataagcgccggatgcgacatcaggctcttgtcaaaacggaaacagcatcgggatcatcaccacacaaaccgccatcacgataatggtgaacggtacccccaacttcacaaagtcactgaagctgtaatttcccggacctaaaaccagtgtgttaacaggtgaagaaaccggtgtcataaaggcggcggatgctgccatcgccacgaccatcgcgaatggataaggcgacacccccatcgttttggcagcagccagcgcaatcggagccatcaacaccgccgtcgcggtattagagataaatagcccaataaccgccgacaagacaaacaaacaccccagcatcatatgtggcccgtaaccaccgccaatgtccatcagccctttcaccgccagcgcgacacctcccgttttctgtaatgccacagcaaacggcatcatcccaacgatcaaaataatgctcggccagtgaatggatttataggcgctttcagcatctatacagcggaatttccccatcagcaggcaggcgatgatagcggcaacaggattaggaatttcatctgtcagcattaacgccaccattagcaccagacagaaaatggcatggggtgcctggctgtgcgcgggtgatgcttcactcacctcttccggtaagttcagcgctacgaagtcgcggccctgtttggccagcataccgatcagtttccagttacccacaaccaggatgatatcgcccagcagcagaggctcatccgccagcgaaccttccagcgccacgccattgcgctttagccccaccacattcagtccgtagcgggtacgaaaaccaatttcgcgcaccgatttaccaatcagttctgactcaggaattaatgaaatctctgccatgcccacatcaagggcctggtcagaaaaatactcgccgcgcagtaccatcggctccagcaattgctcactacaaaattgccggagatcgacatcagccgcagacatatcaataagcaaaacgtcacgcgcgcgaaattcagaaaccccattaacgttcacgataacgcgacgaaaacgccgccagcgttcaacaccgatgacgttagcgccataacgctcacgtaatttgagatcatccagccgttgaccaatcattggcgatccggggcgaatagccagacgtcgcgcacgcccggtcagtcgatattcacggataagatcgcgaaaggttcgacgcgtccagccttcgcgctgcggggtctgggtatcccctttcagcatgaaacgcatcactaacatatacaaaatacccagcaccagcacgaccaggccaataggtgttacgctaaagaaactgaagccgtgatagccttcacgcagcaattcactgttgactaccaggttcggcggcgtcgccaccagcgtcatcatgccgctaatcagcccggcaaaacttaacggcatcatcagacgtgacggcgacgtttgcatacgcatggcaacgcttaacaccacgggaataaagatagcgacaacgccggttgaactcataaacgcgccaagccccgcgacggtcagcatcaacaaaaccaacattttgatttcactattgcccgcaactttgaccagccatgttcccattacggtggcaacaccggtacggaccaaaccatcgccaataataaacaaggcggcaatcaggacaacgttaggatcagaaaagccggaaaatacttctgggactgtcagcgttccgcttaatgcaaacgcgacaataacaaacaaagcgaccgcatccatacgcactctgcccgtcgcaaacaagacgatggcaacggccagtaatgaaagaacccaaatcaattcaccgttcacaacttatccttgttaattgagggggatgacttgattctgccataaaaaagccccgacgagacggggctaaatcatgatcaggtgtttcactgaataataacatcgccatttggctgtttggtcacagtaatttgctccagactgtggaggaccaaatcgacctcattcaggcgcggggtatctgccggagcgttaaccgcaatgacatgacaacccgccgccaggccagaaagcacgccagcgggagcatcttccaccaccacacactcctgcggcgcaagccccagcagctgcgcgcctaacagatacgcatcaggttctggttttccgcgcttcactcgctcagcggttacaaacacctctggtgcgggaagcccagctattttatggcgcgctcgcgctaccggcatggagccagaagtcacaatggcccacggaatacctgctttattcaaatgactgagtaaggcgattgcccccggaagcgcggtaataccttcggtttccgtggcctcgatgtgctccagacgcgtaaactcggcggcaatatcagcctcggatttgcccgccataaaatggcgcagagaggtgatcgcctgtttaccgtgaatgaaagccagcacctcttccggcgctaacccatgacgtctggcccagttgctccacgcccgttctaccgcaggcagggaatccaccagcgttccatcaagatcaaacagaaaacctttgcaccgcacgcgggcctcctcaggcattgataatttgattaatttcgttggcgctcaaatggtactgacgcgggcaggcatgccacacattaagcatgcgctgatatttttcccacattggcgtctgggcgttaaaaccgtgagttccggcgtcaaaatgggtatagcgcccttccacattaaccataaagcggacataaccgaggtaacgtgcttcagtggcggcgtcaaagccgaggaaggtgacacgacgttcatcgatggattgctggtcctgcaaattagaccaggaaacatgcaacgcatgatacatctccataatgtcgatgatagtgcggcaggtttcttctttcagctcgccaaactcgcgatccaattcacgcatctgtaatccgtaaccacgctcaataattgtttgcaggcgacggtaacgttcagcatttgccggatcgagcatagtcatcatcttgtactgattagacaaaataagacgttgcgcgttggtcatttccattgttgactcctgtatcactctactacggtgaaaaaaaagaaggctgagtatgccttcttttatatgcgtaatcaggggtcaattacaaatcatcaaggaaagttttatccagttgtttgaaggcgcgcttaagcgtgtcagctaatgcctggtaatcaggcttgccttcaacgggtgccaacacctgtccagactcctgcaatttaccgcgaacttcataaaaccagttaaggattgcagggggtaatggcgtgacagaacgcttgcccagccaccacaatccctgcatgggtaaacttaaggcgaacagggcagtggcaactgccggcccaagctgaccgcccagggcaatctgccagcagagagtaaatacggcgatcggcggcataaaacggatcgcataacgcgtcatcttgataacgcgattttcgacaaagaccggggcaaggcgtttttccagcggccacgtctttgagtaatgctgtccccggcgaaacaagctaaaaaaattaacagaacgattatccggcgttgacatgcttcacctcaacttcacatataaagattcaaaaatttgtgcaaattcacaactcagcgggacaacgttcaaaacattttgtcttccatacccactatcaggtatcctttagcagcctgaaggcctaagtagtacatattcattgagtcgtcaaattcatatacattatgccattggctgaaaattacgcaaaatggcatagactcaagatatttcttccatcatgcaaaaaaaatttgcagtgcatgatgttaatcataaatgtcggtgtcatcatgcgctacgctctatggctccctgacgtttttttagccacgtatcaattataggtacttccatgtcgagtaagttagtactggttctgaactgcggtagttcttcactgaaatttgccatcatcgatgcagtaaatggtgaagagtacctttctggtttagccgaatgtttccacctgcccgaagcacgtatcaaatggaaaatggacggcaataaacaggaagcggctttaggtgcaggcgccgctcacagcgaagcgctcaactttatcgttaatactattctggcacaaaaaccagaactgtctgcgcagctgactgctatcggtcaccgtatcgtacacggcggcgaaaagtataccagctccgtagtgatcgatgagtctgttattcagggtatcaaagatgcagcttcttttgcaccgctgcacaacccggctcacctgatcggtatcgaagaagctctgaaatctttcccacagctgaaagacaaaaacgttgctgtatttgacaccgcgttccaccagactatgccggaagagtcttacctctacgccctgccttacaacctgtacaaagagcacggcatccgtcgttacggcgcgcacggcaccagccacttctatgtaacccaggaagcggcaaaaatgctgaacaaaccggtagaagaactgaacatcatcacctgccacctgggcaacggtggttccgtttctgctatccgcaacggtaaatgcgttgacacctctatgggcctgaccccgctggaaggtctggtcatgggtacccgttctggtgatatcgatccggcgatcatcttccacctgcacgacaccctgggcatgagccttgacgcaatcaacaaactgctgaccaaagagtctggcctgctgggtctgaccgaagtgaccagcgactgccgctatgttgaagacaactacgcgacgaaagaagacgcgaagcgcgcaatggacgtttactgccaccgcctggcgaaatacatcggtgcctacactgcgctgatggatggtcgtctggacgctgttgtattcactggtggtatcggtgaaaatgccgcgatggttcgtgaactgtctctgggcaaactgggcgtgctgggctttgaagttgatcatgaacgcaacctggctgcacgtttcggcaaatctggtttcatcaacaaagaaggtacccgtcctgcggtggttatcccaaccaacgaagaactggttatcgcgcaagacgcgagccgcctgactgcctgatttcacaccgccagctcagctggcggtgctgttttgtaacccgccaaatcggcggtaacgaaagaggataaaccgtgtcccgtattattatgctgatccctaccggaaccagcgtcggtctgaccagcgtcagccttggcgtgatccgtgcaatggaacgcaaaggcgttcgtctgagcgttttcaaacctatcgctcagccgcgtaccggtggcgatgcgcccgatcagactacgactatcgtgcgtgcgaactcttccaccacgacggccgctgaaccgctgaaaatgagctacgttgaaggtctgctttccagcaatcagaaagatgtgctgatggaagagatcgtcgcaaactaccacgctaacaccaaagacgctgaagtcgttctggttgaaggtctggtcccgacacgtaagcaccagtttgcccagtctctgaactacgaaatcgctaaaacgctgaatgcggaaatcgtcttcgttatgtctcagggcactgacaccccggaacagctgaaagagcgtatcgaactgacccgcaacagcttcggcggtgccaaaaacaccaacatcaccggcgttatcgttaacaaactgaacgcaccggttgatgaacagggtcgtactcgcccggatctgtccgagattttcgacgactcttccaaagctaaagtaaacaatgttgatccggcgaagctgcaagaatccagcccgctgccggttctcggcgctgtgccgtggagctttgacctgatcgcgactcgtgcgatcgatatggctcgccacctgaatgcgaccatcatcaacgaaggcgacatcaatactcgccgcgttaaatccgtcactttctgcgcacgcagcattccgcacatgctggagcacttccgtgccggttctctgctggtgacttccgcagaccgtcctgacgtgctggtggccgcttgcctggcagccatgaacggcgtagaaatcggtgccctgctgctgactggcggctacgaaatggacgcgcgcatttctaaactgtgcgaacgtgctttcgctaccggcctgccggtatttatggtgaacaccaacacctggcagacctctctgagcctgcagagcttcaacctggaagttccggttgacgatcacgaacgtatcgagaaagttcaggaatacgttgctaactacatcaacgctgactggatcgaatctctgactgccacttctgagcgcagccgtcgtctgtctccgcctgcgttccgttatcagctgactgaacttgcgcgcaaagcgggcaaacgtatcgtactgccggaaggtgacgaaccgcgtaccgttaaagcagccgctatctgtgctgaacgtggtatcgcaacttgcgtactgctgggtaatccggcagagatcaaccgtgttgcagcgtctcagggtgtagaactgggtgcagggattgaaatcgttgatccagaagtggttcgcgaaagctatgttggtcgtctggtcgaactgcgtaagaacaaaggcatgaccgaaaccgttgcccgcgaacagctggaagacaacgtggtgctcggtacgctgatgctggaacaggatgaagttgatggtctggtttccggtgctgttcacactaccgcaaacaccatccgtccgccgctgcagctgatcaaaactgcaccgggcagctccctggtatcttccgtgttcttcatgctgctgccggaacaggtttacgtttacggtgactgtgcgatcaacccggatccgaccgctgaacagctggcagaaatcgcgattcagtccgctgattccgctgcggccttcggtatcgaaccgcgcgttgctatgctctcctactccaccggtacttctggtgcaggtagcgacgtagaaaaagttcgcgaagcaactcgtctggcgcaggaaaaacgtcctgacctgatgatcgacggtccgctgcagtacgacgctgcggtaatggctgacgttgcgaaatccaaagcgccgaactctccggttgcaggtcgcgctaccgtgttcatcttcccggatctgaacaccggtaacaccacctacaaagcggtacagcgttctgccgacctgatctccatcgggccgatgctgcagggtatgcgcaagccggttaacgacctgtcccgtggcgcactggttgacgatatcgtctacaccatcgcgctgactgcgattcagtctgcacagcagcagtaatctcgtcatcatccgcagctttgcgctgcggatatctgaaccggaaataatcactatttccggttttttattctcttaatttgcattaatcctttctgattatcttgcttaactgcgctgcatcaatgaattgcgccatcccactttgcatacttaccactttgttttgtgcaagggaatatttgcgctatgtccgcaatcactgaatccaaaccaacaagaagatgggcaatgcccgatacgttggtgattatcttttttgttgctattttaaccagccttgccacctgggtagttccggtggggatgtttgacagtcaggaagtgcagtatcaggttgatggtcaaacaaaaacacgcaaagtcgtagatccacactcatttcgcattctgactaacgaagcaggcgaacctgagtatcaccgcgtacagctgttcacgacgggcgatgaacgcccgggcctgatgaacttcccgtttgaaggattaacctcaggatcgaaatacgggacagccgttggcatcatcatgtttatgctggtgattggcggcgcgtttggcattgtgatgcgtacaggaaccattgataacggtatcctggcgcttattcgccatacccgcgggaatgaaattctctttattcctgcgctgtttattctgttttcacttggcggcgcggtatttggtatgggagaagaggccgtcgcctttgccattatcatcgcaccgctaatggtccggctgggctatgacagtattaccaccgtcctggtgacctatattgccacgcaaatcggttttgccagttcgtggatgaacccgttttgtgtggtcgttgctcaggggattgccggcgttccggtgctttctggctccgggttgcgcatcgtggtgtgggttatcgccactctgattggcctgatctttaccatggtgtacgcctcacgagtgaaaaagaatcctcttctgtcacgcgtgcatgagtccgaccgcttctttcgtgaaaagcaggctgatgttgaacaacgtccgtttacctttggtgactggctggtattgattgtcctgaccgccgtaatggtctgggtgatttggggcgtgatcgttaatgcctggtttattccagaaattgccagccagttcttcaccatgggtctggtgattggcatcatcggcgttgttttccgccttaacggcatgacggttaataccatggcttcatcctttaccgaaggggcgcgaatgatgatcgcccctgccctgctggtgggtttcgccaaagggattttgctgctggtcggtaatggtgaagcgggtgatgccagcgtgttaaataccatcctcaacagcattgccaatgccattagcggtctggacaacgcggtcgcggcctggtttatgttgctcttccaggcggtatttaatttcttcgtgacgtccggttctggtcaggcggcgttaaccatgccgttactggcaccgcttggcgatctggtcggtgttaaccgtcaggttaccgtgctggcgttccagtttggtgatggcttcagtcacatcatttacccaacctcagcgtcgttaatggcaacgctcggtgtgtgcagggtggacttccgtaactggctgaaggtgggcgcgaccctacttggactgctgtttattatgtccagcgtcgtagtgatcggcgctcagttgatgggctaccactaaaaatgttaagagccgcaattgcggctcttttttcattctgccgtttcagtctctacggcttcatttttggcattgcgcttcatccacaacgctagcgctttcagcgagtctggagtgaactcatcgcagcgtgcggtgatttcttccggcgtcagccagcaaacttcactgacttcatcttcctgtagtgcgaagggaccgtgagagacgcagctgaacaatgcgccccagacacggcaatttttatcttcgaaatagaactgcccgtgctcggcaaaggggacaccggcaatgcccaactcttcttccgcttcgcgacgcgcggattccagcagttgctcatcggcctggactacaccgcctgcggtcgcatctaacatgccgggtaaaaagtcttttgtctcggtacgacgctggaccagaattttgcccatgccatcatgcacgacgatgtaagttgcacgatgacgcagacactgtgcccgcatttgttcccggctggcttgtgcaatgacttcgttctcttcattgacaatatccacccattcagtacttgccaaacgacgctgttccattatcaggaaaccttctttttctggcgctcttacggcgcattttgagttgtgggtaaattacggattaatcgcgacctgcgcaatgatactttgatcattgagtgcgattacactaagtacgtcattatccagcatgccataactcgccggattaccgcctttcggaatactcaccgagccggggttgaagtggaaaatctccccccgctgttctgccactggcagatgggtatgaccgtacaccagcacatcgttctggtttaaagcaggcagattttccgggccaaaaagatgaccatgcgtcaaaaacagacgttgtttttccagtaatacctgttgccacggcgcggttatcgggaaatgcagcagcatttgatccacttcgctgtcgcagttgccgcgcacagcgataaccttatgtgccacttcattaagccgttcagcgactttggctggcgcgtaaccctccggtaaagcattacgcgggccgtgattcaacacgtcgccaaggatcaccagccactgggcaccgctttgggcaaacaactccagaacacgttccgtcgccggtaacgacccatgaatgtccgatgcaaacatcagtttcatcactcactcctcgtcgaaaaaacgtaagctatgatactggattctgtcgttgctatcagccagattgcttcgccgaaagtgcaataaaacgctggacagacgctcgctgccactggaatgttgcataatccaccaggcgttctggcacctcatcgccatgtagtaccaggcggttaatcattagcgccagatcagtatcagcaatgcaccattcaccaaataaattcggctgacccagtactaacaaatgttctgccatcgcgaacagtttctctgcactggcttttccctcggccgttagtggcgcttttttcgcccccgcaaagacaacatccgtcggacgctcttcgcggatgggcatcagatcgctgcgcagccaggcctgaatctgtcgtgcacgcgcacgattttctaaatcaagcggataaatacgttcccaggtcggtggcgcaaatcgatcttccagatactccgcaatggcagaagattcactcaactcaaaatcatcgatttgtaataacggcacacggcgtgtctgaccgtaaccttgccacgtcggctgcaaatgttcaccgctgtcgaggtcgatggtcttgatatgaaacgacaggcctttttcctgcaacgccacccaggcggataacacataaggggagaaaaagtgggcatctgaccaaagcgtgatagcgggtttactcattatgtcctcggcaataaagggggctggctatcaaactatagagcctttttgtcactgtcacgtgacgaatactcacgtaagtcgccgcgctttctatacttgtggtgttcagatgattaaacaaccggagctgcaatgatcgatctctatttcgccccgacacccaatggtcacaaaattacgctgtttctcgaagaagcagagctggattatcgcttgattaaggtagacctggggaaaggcggtcagtttcgtccggaatttttgcgcatttcgcccaacaacaaaattccggcaattgttgatcattctcctgccgatggcggcgaaccgctaagcctctttgagtctggtgccattttgttgtatctggctgagaaaacaggactctttttgagtcatgaaacgcgtgagcgcgccgccacattacagtggttattctggcaggtaggcggactggggccgatgcttgggcaaaatcatcattttaatcacgcagccccccaaaccattccttacgctattgaacgttatcaggttgaaactcagcgtctttaccatgtactgaacaagcggctggaaaactcgccctggctgggaggcgagaactacagcattgcggatattgcctgctggccgtgggttaatgcctggactcgccagcgaattgacctagcaatgtatccggcagtcaagaactggcatgagcggatccgttcgcgccctgccaccgggcaggcactgctaaaagcacaactcggtgatgagcgttcggatagttaacagaaacaggttctcgtgtattatttcatcctaagtaaaacaacggagaacctgcaatggcacaacctgccgctattattcgtataaagaaccttcgtttgcgtacgtttatcggaattaaggaagaagaaattaacaaccgtcaggatattgttatcaatgtgacgatccactaccccgccgataaagcgcgcactagcgaagatatcaacgatgcgctgaattatcgcaccgtaacgaaaaacattattcagcatgtagagaataaccgtttctctttgctggaaaaattaactcaggatgtgctcgatatcgcacgtgaacatcactgggtgacgtatgctgaagtggagatcgataaactgcacgcgctgcgctacgccgattcggtatccatgaccttaagctggcagcgttaatcgccatatcgggaggctgcatgaacatagtgatcaccggagggacaggattaattggtcgccatttgattccgcgtttgctggagctgggccatcaaattacggtagtgacgcgtaacccgcagaaagccagttccgttctcggccctcgggtgacactatggcaagggcttgccgatcaaagcaacctcaacggcgttgatgcggtaatcaacctggccggagaaccgattgctgataaacgctggactcacgagcaaaaagagcgtctctgccaaagccgctggaatatcacgcaaaaactggtcgatttgattaatgccagcgacacgccaccgtcggtactcatttccggctcggcaacgggctattatggtgacttaggtgaagtggtggttaccgaagaggaaccgccgcataacgaatttacccataaactctgcgctcgctgggaagaaattgcctgccgggcgcaaagtgacaaaacgcgagtgtgcctgctgcgtaccggtgtagtgctggcaccggatggcggtattctcggtaaaatgctgccgccgtttcgtcttggcctgggcgggccgattggctctggtcggcagtatctggcctggattcatattgatgatatggtcaacggtattctctggctgctggataacgagctgcgcgggccatttaatatggtttcgccctacccggtacgcaatgaacaatttgcccatgcgctcggtcatgcgctgcatcgcccggccattttgcgcgtccccgcgaccgccattcgactgttaatgggcgaatcttcagtactggtattaggtggacaacgcgcgctgcctaaacggctggaagaagcgggttttgcgtttcgctggtacgatttagaagaggcgctggcggatgtcgttcgctgatgtggtttacagcaaacatccgccagttaactcccggtgttacaggattagtggctttgcgcgataagatcgtctggtgaaagtcgggtcaccatcataactaactctctgtctaaacctctatccagcatctcctgagcaatacgcagggcttcttcgtgtttgccctgcattgcgccttcttcacgtaatctgtcagcaatggtcatcagtttctccttttcttgtggtgcgcgttccgctatctcaccaataaatgcacgaaaacgctgggcatcccctgtttgtaatacgtaattaaacagggcttttagctgtctgtcattagtgttccctgtaactagcagcgaaacaatttggtcgactaatcccaacagatcgcgctgacgaatatgtttctgaattaactccaacagcgccattttgcggtgttgcataatctcgtcatccggcaccacggtaatatccaccaacggaaaagccgatgaatatattttgcgggctatagcaggctcggcaaattcatcaagccagcagagtgaataaggataaggacttctgcaaccatgataaaacagcatcgggatcaccaatggaagctctttatagcccgcatcaagatggttttgcattgccgcaatggaataacgcatcatgcgaaaagccattaattcttccggcttactttggtgctctatcactacataaatataacccactccctcctgcgttttcacagaccacaagaggtcggaataatattgccgcaggtcttcatcaataaaactgtttggttccagtttaagcgtcgttaaatcacacagtttgcgcagcggcgcgggaagatgaatatcaataaaatcccgcgcggtgtctggatggcgtaaaaaagatttaaataccgcatcatgcggcgtggaagttgtcgatattgtcatggcgttccgtcacccctcaaatttaagatgacgcgacaataaccacgattaacacccaatgcagcaggcagtttttatctttggacagcgaattcagaagtatttttagcggactgtaacttttacatttcagcggaagctgactcgcaaattccccatgaaaatactccggcagcgttagccaccggagaggaaattatttcagcgatcccttaaggaaccgttgcagacgagggctttgcgggttgccaaataactgctccggcgcgccctcttcttctattttcccctgatggaggaaaatgacatgagtagaaacatggcgagcaaagcccatttcgtgagtcactaccaccatggttttcccctcttctgccagttgctgcataatacgcaacacttcgcctaccagttcaggatcgagcgccgaggtaggctcatcaaacagtaaaacttccggttccatcgccagcgcccgcgcgatagaaacacgctgttgctgaccgccggaaagatgcaccggatatttcccctgcgcacgttcgtctatcccgacttttgccagatacttcaccgcccgctcgcgcgcttcctgcttgctcaggcccaacacctgaatcggcgcttccatgacgttttccagcaccgtcatatggctccagagattgaagtgctggaataccatcgtcaggcgtgtgcgcagtaagcgcagttgatttttatcggcgactttgagttgaccgtctttgtcgcgcaccagattgatcgtctggccattgaccacgatcgacccttcactcggtttttcgaggaagttaatgcagcgcagaaaggtacttttccccgatcccgacgatccgatgatgcttattacatctccggcattcgcttgcagtgatacccctttcagcacttcatgttcgccgtagcgtttgtgcaaatcgataacgtttaatttattctcggacatcgtattctcagtgcgttgaagaaggtttcacatgctgcaaccagcgtttttccgctctgcgaaagaggctgatcaggacataagagatgattaaatagagcaccgcggcaatgccgaaggcggtaaaaggttgatacgtggcggcgttaatatcgcgggctattttcagcagatccggcaccgtggcagtaaatgccaacgcagtagagtgcagcatcaggatcacttcgttgctgtatgccggtaacgcaatacgcagcgcagaaggcaaaataatgcagcgatacattttaaaagtcgagaagccataggctctggcggcttcaatttccccatgcggaaccgaacggattgccccagcaaaaatctcggtagtgtaagcgcaggtgttaagcgtcagcgccagcacggtacagttcaggccactgcggaagaaagcgttaaggaattcggttcccttaacaatctcaagcgtgtacatgccggaatagaacaccagcaactgaacatacagcggcgtaccgcgaaaaatataggtaaataaccagattggaaactggatgtatttattactggagacacgaccaatcgccagaaacagcgccaggactccgcctatcactaccgacaaaataagcagccacagagtgatcgccacaccagtaaagcgataaccgtcggtccacagcagcggtttccagtattcatgtaagatttcgatcacaggtcagccctcttcacacccacggagtagcggcgctcaaggaacagcagcacaccattggaaacagtggtgaaaaccaggtaaatcacgccacagacgatggcgaaatagaacggttcccaggtacttttgcctgccagttgggtggctttgaccacatcttccaggccgagtaacgaaaccagtgcggtagatttgaggatcacctgccagttgttgccaatgcctggcagggcgtaacgcatcatcgacggaaacatgatccgccgaaacacttgcccacgagtaaaaccgaacgccgtcgccgcctctatatgtcctttcggcactgccataaaagcaccacggaacgtttcggtaaaataagcaccgtagataaaaccgagagtgataataccagcgaccatcggatcgatatcaatctgcccgacgcccatcgcctccgtcaccgtgtttagcgcaatctgcaaaccgtagaaaatcagcagcatcaacactaagtccggcacgccacgaatcagcgtggtgtacccttcgaaaatcagccccgaaagccgattttgcgagagcttaccgccagcgccaattaaaccgatgattacagcgagcactacagagctgatagccagctccagcgtgacgagcgcaccctgtaaaataacacctgaaaacccatacaacatgctgcctgtcctgtcgtgtgtggtgaattaccgcctcttgtctccctccggttacccgaagggagcgggctttctttcaccgatggcgattagccaccataaacatcaaaatcgaagtactttttcgctaatttctcgtaagtaccgtcagcgcgcatttcggcaaaggctttgttcagtgcttcgcgcagttcgttatcttctttacgcaggcccatgccggtccctacgccaaacagtttttcatctttaacagacgggccaccgaatttgtaatctttaccgacaggttgtttgaggaaaccttcgctggcagcgacctcatcctggaacgcggcatcaatacgtccggcagtcaggtcagaataaatgttgtcctgcccctgatacgagacgatttcaatgccttttggtgcccaatgttcattaccgaacgtctcctgggtggtgccctgcaatacgcctacccgtttgcctttcagcgactcgactgtcggctgaatgtcagaatttttcgccaccaccaaacgagaatcggcagcgtacagtttgtcggtgaaggctatttcttgctgacgtttttccgtaatggaaagcgatgacatgatggcgtcaatcttcttcgcttttaaggacggaattaacgcatccagcggattttcgacaaacgtacattgcgtattgatgcgtttgcataattcctttgccagatcgatatcgaagccaaccagttcgccttgtgaattttttgattcaaatggcgcataggtcgggtcggtaccgatgcggatgttttgcggaatcgcagcaaacgccgcagttgcgctggagaaggccagaaccagagagagcgatagcaccagttttttcataatgtcctcaactgacagtctttttatagggaatatttacaggtttgttacacttatcgtgccataaaattgaccatcaaggcaaaatatcccgccccgttagacgtattatttttcattaaaaatgcttaagtatgcatttcaatgcaccacgatagtgcaacaaacctggcgtgcaccatgatgatcattccatcaggtacagcttcccagcgacgtatcagtcaccgtagacattaaagtcgaaatactttttcgccatcttgtcgtaggtgccgtcctgacgcagctcgccaagcgccttattgaaggcagccgtcagttcagcatcatctttacgtagccctacaccggtgccatcaccgaagtattttttgtcttttactgatgagccagcaaaggcgaaatctttaccagcaggttgcttgaggaatccttcgctggcagcaacttcatcttgtaacgcagcatccagacgtcctgcagccagatcggaatagaccaaatcctggttggcataggccaccacatccacgcctttactacgccaggtctcgttagcgtaagcttcctgggttgatccctgcagcacaccaacatgtttacctttcagtgaatccagcgttggctgaatcggtgaacctttggccgcaatcaaacgagaatctgcggcgtacagcttgtcggagaaggcaatctcctgctgacgtttatcggtaatggaaagcgacgaaataatagcgtcgatttttttcgctttcagtgaggggatcagcgcgtcaaagtcactggcaacccaggtacatttcacctgcatccgtttgcacatctcgttaccgagatcgatatcaaagccaacaaaatcacctttagcatctttcgatgagaacggtgcgtaggtggtatcggttccgatacgtaccgtctccggtagcgccgcatagctggaagccgctgtggagagaccgactaacaaagacagagcgagaatcgacttcttcatacataaccctcaagtgaaaatggcttttttatgttgtgtattgtgttgtgtgtttgcaggctctttcatgcaggtcttatgccatcttgacgacaacagtaacattcaacgttaaatatgttaataagacgttgcattattgtcctgaagttgaagatagcaggtatagcggttgaatcgcagcgtttcgattgaatggcagaaacaaaatgtcgaggatttgatcgcggttgcaaaattgccctgaaacagggcaacagcggagttatgcgccctgccagcgggcaaagagatcttcaggaagggttatcgcaaactggtcaagaacacgattaaccgtctgatttatcacatcatcaagggattgcgggcgatgataaaacgccggaacgggaggcataatcaccgcaccgatttctgccgcctgagtcattaaacgcagatggcctaagtgcaatggtgtttcacgcacgcagagcaccaacgggcgacgctctttcagcaccacatctgccgcacgggtcagtaagccatcagtatagctatggacaatgccggaaagggttttgattgaacagggtaaaatcaccatccccagcgtctggaaagaaccggaagagatgctggcggcaatatcgcgcgcatcgtgcgtgacatcggctaatgcctgcacttcgcgcagagaaaaatccgtttcgagggataaggtctggcgcgctgcctggctcatcaccagatgcgtttcgatatctgtgacatcgcgcagaacctgtaataagcgcacgccataaatcgcgccgctggcaccgctgatgcctacaatgagtcgtttcataaatagttgccctgtcagacttgcaggcagactttgcaggatttcggcgggagttgcaagtcagggtgccagaccggcaccctcagcgaaggcatcatccttcgttatgcatttcgagattttccacttcgttctgacgttgcactgctttggcgtcatcattacgtaacgtatcgaggaaatcgaggtagccctgatcaacatctttggtgacgtagacgccgttgaacaccgagcattcaaactgctggatatccggattttcagcgcgaacggcgtcgatcagatcgttcagatcctggaaaatcaacccgtcagcaccgatgatctggcgaatttcatcaacttcgcgaccgtgagcgatcagttccgtggcgctcggcatatcaataccataaacgttcgggaagcgaatttccggtgccgcagaagcgaggtacactttcttcgctccggcttcgcgtgccatctcgataatctgctcagaagtggtgccacggacgatggagtcgtcgaccagcaggacgtttttatcgcggaactcggcgcggttggcattcagtttacggcgcacggacttacgacgcagctgctggcccggcatgataaaggtgcggccaacatagcggtttttaacgaagccctggcggtacggtttgcccagaatacgagcaatttccagcgcgatatcacacgaggtttctgggatcgggatcaccacgtcgatatccagatcttcccattcgcgggcaattttctcgcccagtttcgtgcccatattcacacgcgcgctgtaaacggaaattttgtcgataaacgagtccgggcgggcaaagtatacatactcaaacaggcacggattgctgaccggattgtcagcacattgacgggtaaacaactgcccttcttcagtgatgtaaatcgcttcgcccggcgcgacgtcacgcaggaaatcaaagcccaacgtatcgagcgctacgctttcggaagcgaccatatattctgtacggttctcgtcaatatcacgttttcccagtaccagcggacgaatcccgtttggatcgcggaaagcaaccataccgtggccgataatcatcgccacacaggcatacgcgccgcggattaagcggtttgtggcagcaatggcagcgaaaatattgtcggcttccagcgggtagtggcggaagttgtccagctcgctggcgaagatattaagcagaatttccgagtcggaagtggtgttgatgtggcggcgtttttcttcaaacagttttttacgcaactcgtgagcgttggtcagattgccgttgtgggcaagcgtaatgccatacggggagttaacgtaaaacggctgcgcttcagaggcgctggagctgccagccgtggggtaacgcacatgaccaatgcccatattgccctgcaaacgctgcatatggcgagcttcaaatacatcgctcaccagcccgttcgctttacgcaaacggaagcagttattggcatctatggtgatgatgccggcggcatcctgaccgcgatgctgaagcaccgttaaggcatcataaatcgactggttaaccggcataacaccggcgataccgacaataccgcacatacgtctttttcctcgttaagccacatctcagagcacttacgctctgggcaagaaacttgacgagctttgcagataatcaaaaaaccatctgatgataaaactgaattgcgggatcagctgtgatttgctccagtcttcgcttttcgacaccccggtaaaggagtcgagaaagaagagaatggcagcaacaatcaacacaccgcgcaacgcaccgaaacagacgcccagcacccgatcggtgcctgacaaccccgttttctccaccaactggcctatcacgaagttcacgatagcaccaacgatcagggtagcgataaacagtaccgcgatggcaatcccatttcgaaccagttcgtcttcaaagcccgtaaaccagactgacaggtaagtgtagtaatgactggcaacaaagaaagcacaaccccatgtcaccagcgataacgcttcacgaacaaagccgcggatcaggctaaccagagaggaaaaagcaatcaccgcgattatggcgtaatcaatccagaccatatgtgtcccacgattttacgccctgtcatcctgttcggggcgcattctaacagaaaaagaaaacgtttgcgtagggatttccttcccgcgcatcaataaaaatggcgctgaaaaaatattcaacgccatcgactttttatgcctttgcggcatcgggcaatgcgtgtcggatgcggcgtaaacgccttatccgacctacggttctacccctgcgtaggcctgataagacgcgccagcgtcgcatcaggcaagaccgtattaattcggcgtatagcccattaccacgccacttaagccagaaagttgcttcaactcacccagcgaacctttcagcttatctttcgaggcatccggcccaaccagaatacgggtaattttaccctgcactggcgtggatggcgacgtataaacccgataaccggcaccgcgcagcttaccgacaatctcattcactttatcggcatttttcagcgcacccagttgcacaacataggctttacccgtcggtgcagctttttcttccacgaccggcttcggttctggcttcggcgcaggtggtgcttcaacctttggtttaggcggctccaccggtttcggcttcggtggggcgaccggtgcaggttccggttcaaactcggtgttattggctgcaatagtggccggatcgagcgacggtgctgcggcatcacctgcccgcacctcttccgctgcgccttccggcggctgcgtcggtaacgcctgggtggcggctggcatcatatcaggctcatcacgatcgcccgctttcggcaccagcgggatagccgcgaactcatcctgataatgttttttctgcccgtccagcagccctggaagtacaatcacccccagcgccaccagcacgatcgtgcccactaaccgattctgaaacttacttgccaccgcttctcctcgcgtcaatcacttccatgacatgtgcgaccgtgtggaaagaaccacacaccagcacggtgtcttccgctttagcgtccgccattgcggcatcccatgcctgcgcaacgctatcaaatgatttgccgttacccaaatgctcaagcagttgttctgccgtggcaccgcgcggcccttccagtggcgcacaataccagtcatcaaccacgcttttcaaccaggccagagttccggcaatatctttatcatgtagcataccgataaccgccagcacgcgcccgtttttcggtagcgctttcatacgcccggtgagatattccgccgcatgtggattatgcgcgacatcaaaaataacgcgtggcgactcgctcacaatctggaaacgtcccggcaaaattgcgctggcaatcccgtcgcgaatggcattttcactgacttccagcccgctggcacgcagtgccgccagcgctgttgcggcattcggttgcgggacaagcggcaacggcagattttccagcgtgccgtgagcatcgctaaacgcccagtcatgatcggtgacggaatagttccactcaacgccccgacgttgtaacagtgcacctttttcctgcgccacatcagcaatggtagaaggcatttccggctcaccgacaattgccggtttttcgctgcggaagatgcctgctttctcgcgaccaatactttcgcgatctggacccagccagtcggtatgatccagcgcaatactggttactaccgcgacatcggcgtcgacaatattggttgcgtccagacgaccgcccagccctacttccagaatcaccacgtcaagttgtgcctgcttgaacagccacaacgccgacagcgtaccgtactcgaaataggtcagggaaatatcaccgcgtgccgattcaatctccgcaaaagaggcggtgtgggccgattccggcaattcctggccctgcacacgtacgcgctcggtataacgcaccagatgaggcgaactgtagacgcccactttgtaccctgccgccatcagaatcgactccagcgtacggcaggtggtgcctttgccattcgtacccgcaacggtaaacacaaatggcgctggtttcaggacgccaagacgcgccgcgaccaggctcacgcgctcaaggccgagatcgatagttttactgtgcaggttttccagataagaaagccacgaagccagaggcgacgcggcttgaggagtgcgtttgataatcatggtatccgctgattcgttacggtgagaatagcaaaagggcagagccagtggccctgcccttatcagttatcaggcctcaggttcctgatccggtaccgggggtaccactacgccttcacgcggcgcttcaggattcggcgctggcagattcatcaacttcgccagaatgctcgccagtttcaggcgcatttccggacgacggacgatcatgtcgatcgcgcctttctcgatcaggaattcactgcgctggaatccaggcggcagtttttcgcgaacggtctgttcgataacacgcggaccggcaaagccgattaacgctttcggttcagcgatgttgagatcgcccagcatggcgaaacttgcagaaacaccgcccatcgtcgggtcggtcagcacggagatgtacggcaagccgcgctcctgcatttttgccagtgccgcagaggttttcgccatctgcatcagcgacatcagtgcttcctgcatacgtgcgccaccagaggcggagaagcagatcagcgggcagttatcttccagcgcctgctcaacggcacgcacgaaacgtgcacccacaacagaccccattgaaccgcccataaaggcgaactcgaatgccgcagcgacaaccggcattccatacagagtgcctttcatcaccaccagcgcatctttttcgccggtttctttctgcgcagatgccagacggtctttatacttcttggagtcacgaaacttcagcacatctttcggctcaagctcgctacccagctccacaaggcttccttcatctaacaggctatgcaggcgattacgcgctgtcatacgcatgtgatggtcacacttcggacagacctcaagattacgttccagctcagcgcggtataaaacctgaccgcagctatcacacttagtccacaccccttcaggaatgctcgccttgcgggtgggagtaatgttgcttttaattcgttcaatccagctcattagggacctttctgtctgaacctggttcgatgccagttttatctttggggacgcataatgccatttttgcccccaacagaccatgaatgttgcacattaaaacataacagcccgaaactttggataaaaaagtggtcgaaccgcggagttactttttattttgcggcgcgtgccgcagcgcgtttgtgacggattatttcgatgacgcccggcaaaatagaaaccacaataatcccgacgatcagcagcttaaggttatcctgaaccatcgggattgtaccgaagaaatagcctgcgtaggtaaaaagcagtacccacaacagtgcgccgatcacgttataagcggcgaaatgacggtacgacatgtggcccattcccgcaacaaacggggcgaacgttctgacgatcggcacaaaacgggcgagaataatcgttttgccgccatgtttctcataaaactgatgggttttgtcgagataactgcgacggaaaattttcgaattgggattactgaacaacttttcaccgaacaaccgcccgatagtgtaattgaccgcgtcacccacaatcgcggcgatcagcatcagcaccaccatcatatggacgttgagatcgttggtttccagtgatgccaacgctccggcaacaaacagcaatgaatcacccggtaaaaacggcgttaccaccagaccggtttcacagaacaaaattaagaacaaaatggcataaacccagacgccgtactccgcgaccagctctgccagatgcacgtcaatgtgcaggataaaatcgatgaggaaataaatcaggtccatatttgcctatgccttgtactcgtcatctttcaggctgtaactacgttggctacagcctgaaatgttccgagcattattctcgttagtccgccagaaatagcgggcccattggcggttttggaagatcataccggtcagggtaatccaccgcgaccagatacagcccttccgcttttgccgttgctgccgccagcgttctgtcctttgccgccagcaactctgctatccagctctccggctggttgtgggcaccgacttccatcaggctgccgacaatattcctgaccatatgatgtacaaaagcattcgctttaatatctaccaccacataaggaccgtgacgcgtgacattaatatgcataacgttgcgccacggggttcgggactggcactgcaccgcacggaacgaggtgaaatcattctcgcccagcaagcattgcgcagcccgatgcatccgttcagcgtccagcggttcgtaaaaatgggttacccctttactcagtaccgccgggcgcagccgatgattgtagatgatgtagcgataacggcgagccgtggcgctaaatcgggcatgaaaatcatcaggtacagctttaacccaacgcacagcgatgtcaccaggtaaattcgcatttacgcccaaggtccacgccgcgtctttgcgcagcgcggttgtttcgaaatgcacaacctgcccggtaccgtgtacccctgcgtcagtacgcccggcgcagaagacggtgatgggttcgttcgccacctgggagagcgccttttccagcttctcctgcacactgcggacttcgttctgccgttgccagccgtaatacttactgccgtcgtactcaatgcccagcgcaattttataaactggcggttgttgctggtcggacattagtacagatactcctgcaccagtttctcggcgatttttactgccatcagcgcgccgccaaagcgaacgttatcggccaccgaccagaactggacttgctccggcataccgtagtcattacgcacgcagccaacagaaagatgcggcgtacccgaagcatcacctacctgagttgggaattcgttctcttcagagagcacaatatcttcgccttgaacaaacgcatcacgcgcttcttctgctgccagtggacgcagagcttcaaagttgaccatctgggcatgaccgtagaataccggtgcctggacgacgctagccgaaatcatcagcccttcgtcctgcaggattttgcgtacttcgtcaacgatacgacgttcttcacgcacgctaccttcgctatccggcagtaacggcagcatgttgaacgccagctgacgcccgaagaaatcttcttcgtcaatcggaatgccgttgagcaatttcgcactctgccccgctaacgcatcgaccgcttttttgccctgggcggaggctgaaatcaggctggtaacgctgatacgtgataaaccgccctgatcgattaacggtttcagtgccgccagcagctggctggtcagactgtctggtacggcgatgacattccggttccggtaatctgtcagtacaaacgggtttacttccggcaccaccagcggtacgtcgggttcgagagcaaacaatccactgctgtcgatcaccaggcaacctgagttggtcgcttcttcaacccaggcagcggtagcttctttgcctgcgacaaaaaatgccagctgcgcctgcgtccagtcgaattcagcggcatcctgcacggtgattgtcttaccaccaaagcgcagttgttcgcctgcgctttcgttacgtgccagtgcataaatttccccaaccgggaactgacgttcagccagcgtttcaagcagggcttcgcccacagcgccagttgcgcccaggacggcaatgttccagccttcagacatggtggtttactccagaaatagcaaagctccctgccaatgttacagcagagagcatgaagaagagattaacgtgccggatgatgaacggcgttaaaacccagtttacacagcaatgatgccgcactggcgtcatcacaaattacatacagagatgaccattcacggcgctcaagatagtttttgcgcagtttatcgaactcacccggtatcccggcgactttacgcagcggtgcgtcatcgcggcgcacatcatacaccaaatgcaccagccttttcagcgtcggttgatcgagcgggccatgcagcgtaatgcgaccaaactctggcgcaggcagtaatgtatccagcgcaacgtgctgttcatgcccaataaacttgctataagcttcaaacacttgcgtagtaccgcgtgctttaccttccagggtatagcctgcgatatgcggcgtgccgatatccacttttttcagcagctcgacgttgagttccggttcgccttcccagacatccagcactacgcttaacttctggccttcattcaggcaggtcagcaacgcagtattatcgacgactgcgccacggcaggcgttaatcagaatcgctccgggcttcaggctacggatcagtttttcatccgccagatgtagcgttttgtacggaccatctttaaagagtggcgtatggaaagtcagaatatccgcgcgctggactaactcatccagcgagcggaaatcaccctcatccccacggtcggcgcgaggcggatcgcaaagtaaggttttaatccctaacgcttccagtcgcgcctgcaatcgacgtccaacgttaccaacgcccacgatccccaccgtacggtcgtacagtgaaaatccatcgcgttcggcaagcatcagcagggaggagaaaacatattccaccaccgcaatcgcattacagccaggtgcagcggaaaaaccaattcccgcctgcttcaaccatgcttcatcgacatggtcggtccccgcagtggcagtgccaacaaatttaatgggttttcctgccagcaaagattcattcactttcgtgaccgaacgcaccatcagcgcatccgcgtctgccagttgagcgacggggattggacgcccgggaaccgcggtcacctcacccaaacggctaaataagtcgcgggcataaggcatattttcatcaacaaggattttcacgtttgtgttacctgtatgagacgagagttaaccggacaagtgtgccataatctcgcggccaggcatacttgcgaagatttcaggtataaggatacgtaatgatacaacctatttccggccctcctcctgggcaaccaccaggtcagggagataatctgccgtctggcacgggcaatcagcctttatccagtcagcaacgtacttcgctggaaagcttaatgacgaaagtgacctcactgacgcaacagcaaagagcagaactgtgggcgggtatcaggcacgatattggtctgtcgggagattcaccgctgctttcgcgtcacttccctgccgctgagcataatctggcgcaacgtctgctggtcgcgcaaaaaagccattctgcccgccagcttttagcgcaattaggggagtatttacgtctggggaataatcgtcaggcggtcacggattatatccgtcataactttggtcagacgccgctgaatcagctctcaccggagcaattaaaaaccattctcaccctgttgcaggaagggaagatggttattccgcaaccacagcagcgcgaggcgaccgaccgtcctttattaccggcggagcacaatgcgctaaaacagctggtgaccaaacttgcggcggcaacgggggaacccagcaaacagatctggcaatcgatgctggaactttccggggtgaaagatggcgagttaattccagcgaaactgtttaaccatctggtgacctggctacaggcgcgtcagacgctaagccagcaaaatacgccgacgctggaatcactacagatgacgctaaaacaacctttagatgccagtgaactggcggcgttatcggcatatatccagcaaaaatatggtctttctgcgcaatcatcgctttcttctgcccaggccgaggatattcttaatcagctttatcaacggcgggttaaagggattgatccgcgtgttatgcaaccgctgcttaatccttttccaccgatgatggacacgttgcaaaatatggcaacgcgtcccgcgctgtggatactgttagtcgcgattatcctgatgctggtctggctggttcgttaaccccgacgaaatgacagtatcgtgacaataatacccagcaccgcagagatcgccccggcaagaaataccgaagagtaaccaaacgtggtcgccagcattcccgccagcggcccggagacgccgagggcgatatcctgaaacgcggcgtaaccgcccagtgcggtgccgcgaacttgtgaggggacgcgtttaaccacctccacgcccagcgcaggaaagataagcgaacatccggctccggttaacgccgcgcccgctaatgcgacccatgcacctggggcttgccagagcagcaacaagcccaccgtttctacaagcagagagacaatcgccactttcacgccgccaaaacggtccggcatccagccaaacatgacgcgcatcacgacaaatgcgccgccaaacgcggtaagagtaaagcccgccatcgcccatcctttgctggcaaagtagagcgaaacgaaagtcccgataacagcaaaaccaacgccttgtagtgccagacctaaccctggtttccagataagcccgacaacgctccacagcgatggacgttctcccgccagggccggtactttgcgcactgtgccgttacaggcccacgccagtacgggtaataccattgtggtgatcgccagtgcggcaaaaccgtaatggctatgaatcaacaggccaagcggagcaccaacagcgagggcaccgtaaatcgccattccgttccatgacatcactttgccagagtgttttggccctacgatgcctagtccccaggtcagagcgcctgtcagtaactggctttcaccaaagccaagaatcaaacgcccgacgaccaacagagcaaatttgaacggtgcggagacaggcaaaatcgccgccagcagcaacgcgccgccagccagaccacaagctaacattccctgaagcgccgaacgttttgcaccatattgatcggccagtcgcccggcgtaaccacgcgtcagcaccgtagccagaaactgaatcccgacggcaatgccgaccatggtattgccatagcccagttcatgatgaacaaacagcgggataaccggcaacagcaaccctacggtcatgtaggtgagaaaaaccgcaaaagcgatgcggaagagcgaaaaattggcagaagatcgtgtttcggtttggcttacagcagtcatgcattactccagaatgcagcgcaaggcgaggagtatccccgtctcatctctctggtttcagggttacggtgcgttggcaggatttaacgcgtacgtcttttcagaaggaaatcgacaaagcgggaagtttgcctggaactggcggcgattgtcaatgatgtgaaaaagggaaccatcaggttcccttttgcgttagtgccggaggccgcattggcgcgtaacgtcggatgcgacgctggcgcgtctactccgacctactgcgaattaatctttcagcttgcgcattaccagcgtggcgttggtgccgccgaagccgaagctgttagacataacggtggtcagttcgcgatcggtcgtttcggtcacgatgttcagacccgcagcctgctcgtccagctcttcaatgttgatgctcggggcgataaagccgtgttccagcatcagcagagagtagatagcttcctgtacgccagcagcgcccagagagtgaccggtcatggctttggttgcagaaatcgccgggctcttatcgccgaacacttcacggatagctgccagctctttcacgtcgccaaccggagtcgaagtaccgtgggagttcaggtaatcgattgggatatcaacgccatgcatcgccatcttcatgcagcgtactgcgccttcgccagacggagcaaccatgtctgcaccatcagaggttgcgccgtagccaacgatttcagcatagatgtgagcaccacgcgccagcgcgtgttccagctcttcaaccactaccataccgccgccgccagcgataacgaaaccgtcacggtgagcgtcgtaagtacgggaggctttttccggggtgtcgttgtatttagtagacagcgcacccattgcgtcgaattcgcaagccatttcccagcacagctcttcgccgccgccagcaaacacgatgtcctgtttgcccagttggatctgctctactgcgttaccgatacagtgtgcggaagtcgcacacgcggagctgatggagtagttaacgccatgaattttaaacggggtggcgaggcaggcagaaacgccggatgccatcgctttggtgaccacatacgggccaaccgctttcaggccgcgcgggccgcgcattgcgtcagcgccgaacacctggaaacgcggggagccgccgccggaacctgcaatcaggccaacgcgcgggttattctggtaagcttccggagagaggcccgcatcagcgattgcctgctccatagaaaggaatgcataaatggatgcgtcgctcataaagcgcacaactttgcggtcaatgaggccagtggtatccagttttacgttgccccagacgtggctacgcatgccggaatccttcagctcctgagagaaagtgatccctgaacgtccttcacgcagagatgccaggacttcctgctggttattaccgatgctggaaacaatgcccaggccagtaatcactgcacgtttcattcaatacctctgtaagtcgcacatagagtaagtttcgaatgcacaatagcgtacacttgtacgccgaacaagtccgatcagccatttaatagagaaatttgcgcagccttacacacatcgctaagatcgagccaccgcctgtaagacgagtaacttacgtgaaacactactccatacaacctgccaacctcgaatttaatgctgagggtacacctgtttcccgagattttgacgatgtctatttttccaacgataacgggctggaagagacgcgttacgtttttctgggaggtaaccaattagaggtacgctttcctgagcatccacatcctctgtttgtggtagcagagagcggcttcggcaccggattaaacttcctgacgctatggcaggcatttgatcagtttcgcgaagcgcatccgcaagcgcaattacaacgcttacatttcattagttttgagaaatttcccctcacccgtgcggatttagccttagcgcatcaacactggccggaactggctccgtgggcagaacaacttcaggcgcagtggccaatgcccttgcccggttgccatcgtttattgctcgatgcaggccgcgtgacgctggatttatggtttggcgatattaacgaactgaccagccaactggacgattcgctaaatcaaaaagtagatgcctggtttctggacggctttgcgccagcgaaaaacccggatatgtggacgcaaaatctgtttaacgccatggcaaggttggcgcgtccgggcggcacgctggcgacatttacgtctgccggttttgtccgccgcggtttgcaggacgccggattcacgatgcaaaaacgtaagggctttgggcgcaaacgggaaatgctttgcggggtgatggaacagacattaccgctcccctgctccgcgccgtggtttaaccgcacgggcagcagcaaacgggaagcggcgattatcggcggtggtattgccagcgcgttgttgtcgctggcgctattacggcgcggctggcaggtaacgctttattgcgcggatgaggcccccgcactgggtgcttccggcaatcgccagggggcgctgtatccgttattaagcaaacacgatgaggcgctaaaccgctttttctctaatgcgtttacttttgctcgtcggttttacgaccaattacccgttaaatttgatcatgactggtgcggcgtcacgcagttaggctgggatgagaaaagccagcataaaatcgcacagatgttgtcaatggatttacccgcagaactggctgtagccgttgaggcaaatgcggttgaacaaattacgggcgttgcgacaaattgcagcggcattacttatccgcaaggtggttggctgtgcccagcagaactgacccgtaatgtgctggaactggcgcaacagcagggtttgcagatttattatcaatatcagttacagaatttatcccgtaaggatgactgttggttgttgaattttgcaggagatcagcaagcaacacacagcgtagtggtactggcgaacgggcatcaaatcagccgattcagccaaacgtcgactctcccggtgtattcggttgccgggcaggtcagccatattccgacaacgccggaattggcagagctgaagcaggtgctgtgctatgacggttatctcacgccacaaaatccggcgaatcaacatcattgtattggtgccagttatcatcgcggcagcgaagatacggcgtacagtgaggacgatcagcagcagaatcgccagcggttgattgattgtttcccgcaggcacagtgggcaaaagaggttgatgtcagtgataaagaggcgcgctgcggtgtgcgttgtgccacccgcgatcatctgccaatggtaggcaatgttcccgattatgaggcaacactcgtggaatatgcgtcgttggcggagcagaaagatgaggcggtaagcgcgccggtttttgacgatctctttatgtttgcggctttaggttctcgcggtttgtgttctgccccgctgtgtgccgagattctggcggcgcagatgagcgacgaaccgattccgatggatgccagtacgctggcggcgttaaacccgaatcggttatgggtgcggaaattgttgaagggtaaagcggttaaggcggggtaatctgctctcgcagtgtttgccggatgcggcgtgaacgccttatccgacctacgtgtgacgtgtaggcctgataagacgcgataagcgtcgcatcaggcatgctgctccagacgccgcaacttactgctgtgacgcctgctgaaacaggttttcccacatatcggtcaccagcgcctggtcacgcggcgacaattcaccagcaccaatggctttttccagactctggctaacggtcgtatgcaccgcctgagcggagtggtcatcaccactttccagttctgcgatggctaatgtcaggtggccacgcaaatacccactggcaaacaactcatcatcactggcatggtcaaccataccgtcgattaatgccagaatgcgtgattcaaactccgcgatcatcttctttcctcattgtaaaacgtggcgctggcttcagttgagcgcttccggccacgggaactgttccgccgtaagttccggcgtgtgataataattttgtagtgctttaatgaagcgtgccgggcgttcgggaatgccgtttgccagataatccatcacctgcgcatgtactcgccgttgaaataccacacgatccggttcgaagtcgccttccagattgtcgcaactgacgttaaacggatatcccgccgccacacagaacaaccagtcgagcgcctgcggcttcacttcaacatcttcaaactggctttgcgtctgggcatcgcgtccgtccgggcaataccagtagccgaaatcaaccagctcacggcgcgcttttccggcaatacaccagtgcgaaatctcatgaattgcgctggcataaaagccatgagcaaagacgattcggttatacggtacttccgcatcagcaggaagatagatcggttcgtcgtcgcctttaatcagacgggtattaaaattatcggcaaagcagctattaaaaatttcaatcaactgctcgtagtggtgtgtactgttcattagttcatccccaaccagtggaggatctcctgtccgtggctgtcgtaaagtaatttggcactcatcaccgccgagacaataacaatcatcgggcggatcagcttttgtcctttgctcaacaccagtcttgaacccatgcgcgcgccgaggaactgccccaccagcatgacaaagcccgtcgcccaaatcactttgccaccgagaataaacagcagtaaaccgccgatatttgacgttgcgttgagtaatttggcgtgagccgtggctttggcgaggttgaatccgcacagcgtaacaaaggccagtgcgtaaaacgatccggctgccggaccaaagaatccgtcataaaaaccgacgcagccaccggcaattaacgcgaagggtaaaccgtacatccggcgctggcgatcttcttcacccagctttggcatcagcaagaaatagaggccgatacaaattaccagaatgggcaaaatctgccgtaagacatcagcctgaacgtattgcaccagcagtgcgccgctcattgagccgacaaaggtcatggcgatattgagtttctgatcgcttaaactaaccactttgcggcgaataaagtagatagtggcggaaatagagccgccgcaggcttgcagtttattggttgccagcgcattagcgggagacatccccgctgccatcaatgccggaatggtgagtaacccaccgccaccggcaatcgagtcgataaatcccgccagcatggcgacaaaaaagagaactcccagcaacagcggggaaaccataaacaggctattaaacgtttccattagatcacgtgctcatccagtagcgcctggcaggaaggcggcaacggaggcggtgtcttcttctcaggctttgttgttcccggttttggaggttcaaaccagctttgcagttctgccccgcaaccatcgcctggtggcggtaaaggttgatcttcacactccagactatcggcaggacaacgtaatcgtacatgcatatgcgcgcgatgctggaaccagggtcgcactttgcgcaaccagtcgcgatcggtgcccgcatcaaggcaaagttgttgtttaatcgccggattaacaaaaatgcgtgtgacgtctttgtcctgggcggcgagtttgatcaagctgaaaatttctggcttccacagcgtggggacaacgtgtttaccgtcgcgggaaactaagtccagtgcttgcgggcgcaagagctgcgcggaggtccagcgtgttttcggcagttgcaagaagatatcaacatccagtccggtctggtggctggcatgaccgccgttgaaacgcccaccagcgggcatccccatatcgccaatcagcaccgtacccatgcccagattgctcacctggctactcagacgctggataaacatcactagatccgggtgtccgaaatagcgacgctgatcggtacgcatgacctgataatgttcggactgtatcggcagcgtgtcagcgccgacgatacagccattagaaaaactgcctatcgattgtgcgctacccggcacaggttgggttattttttgccacggcgtcgctgccaggcaggcgctactggcaagcagggccagcagcgcaatcgcggttttgttcattttttaccagcgtggaatatcagtcttcacatcggcattttgcgcccgttgccgtaacaggtgatccattaaaacgatcgccagcatcgcttcagcgatcggcaccgcgcggatcccgacacagggatcgtgacggcctttggtgatcatctcaacttcttcgccaaagcggttaatggtacgccccggcacggtaatgctggaggtcggtttcagcgccatatgggcaatgatttgctgcccgctgctgataccgccgagaatgccgcccgcatggttgctctggaaaccgtctttggtgatttcgtcgcgattctggctgccgcgcagcgccactacgtcaaaaccgtcgccaatttccacgcctttcaccgcgttgatgctcatcagcgcatgggcgatgtcggcatccaggcggtcaaagaccggctcgccaagtccggcggggacaccactggctacaacggtgactttcgcgccgatggagtcgccctcttttttcagcgcgcgcatcagttcatctaacgcgtcgattttgtccgggtccgggcagaaaaacggattttgttcaaccagcgaccagtctttgatttccagcggaatgtcgcccatctgggtcaggcagccgcggatttcaataccaaatttctcggcgagatattttttggcaatcgcccctgccgccacgcgcatggcggtttcgcgggcggaagaacgtccaccgccgcgataatcgcgcagaccgtatttttgttcgtaggtgtaatcggcatggcctggacggaaaacgtccttaatcgcactgtaatcctgagagcgctggtcagtgttttcgatcaacaagccaatgctggtgccagtagtaacgccttcaaaaacaccggagagaattttgacctgatccggctcgcggcgctgggtggtatagcgcgatgtcccaggacgacgacggtcaaggtcatgttgcaggtccgcttccgtcagcggaatacccggcggaacaccatcgacgatgcagccgagcgccagcccgtgcgattcgccgaaagtggttacgcgaaagagttgtccaattgtgtttccagccatcacggctccgttattgttgtgtttgcgtgtttacttaatctttataaatcgcgaaatgttcacgggccgccagcagctgctctttggtgagcataaacacaccatcgccgccgttatcaaactccagccaggtgaacggaacatccggatattgttccataagatgtaccatgctgttgccgacttcacaaatcaacacgccatcatccgcaaggtaatctgccgcgttaccgagaatgcgacgcgtcagtttcaggccgtcggtgccagatgccaggcccagttccggctcgtgacggtattcgtttggcaggtcggacatatcttccgcatcgacatacggcgggttagtgacaatcaggtcgtactgcactttcggcaagtcgcggaacagatcggaacgaatcggaatgacgttgtggatcagaccgtgttcttcgatgttctgttcagcaaccgccagcgcgtctggagagatatccaccgcgtcgacttccgcttccgggaaggcataagcacaggcaatggcgatgcagccgctaccggtacacatatctaaaatatgctgcggttgcctgctgataagtccggcaaatttattgttgatcagttcaccaatcggcgagcgcggcaccagcacgcgttcatcgacgtaaaattcatggccgcagaaccacgctttgttggtcaggtaagccaccggaatgcgttcattgacgcggcggatcacgcgttcaacaatacggtgtttttcgctggaggtcagacgcgcggtgcgcatatcttccggaatatccagcggcaggtagagcgaaggcaacaccagctgtacggcttcatcccacgggttatcggtaccgtgaccgtaccagatatttgccgcgctgaagcggctcaccgaccagcgcaacatgtcctgaatggtttgcagctcatttactgcttcatcaacgaaaattttatccacgtattcctccagggcatgatcgcaataatttcggcggctagtttgccatgaagatgacgataaatcagcattcacgcgcggtgagtgaggaaaaatacgtttaaaacgatcgattgcgctacgagtcgggtaaactgtaggaaaattagaaatagagacgcataaatgaaaaagaaaacaacacttagcgaggaggaccaggctctgtttcgccagttgatggcggggactcgcaagattaagcaggacacgattgtccaccgaccgcagcgtaaaaaagtcagcgaagtgccggtgaagcggttgattcaggaacaggcagatgccagccattatttttccgatgagtttcagccgttattgaataccgaaggcccggtgaaatatgtacgcccggatgtgagtcattttgaggcgaagaaactgcgccgtggcgattattcgccggagttgtttttggatttacacggtctgacgcagctgcaggccaagcaggaactgggggcgttgattgccgcctgtcgccgcgaacatgtattttgcgcctgcgtgatgcatggtcacgggaagcatattttgaagcaacaaacaccgctgtggctggcacaacatccgcatgtcatggcgtttcaccaggctccaaaagagtatggcggtgatgcggctttgttggtgttgattgaagtggaagagtggctgccgccggagttgccctgaacgtttttaacccgcttcagactgccgagctgcaaaaatgcacagtagcattaggcataataatataatttaacgtcgcctcccatcggagcaaaagattgccggaggcgacgcgacaatagaggtcacaactcatttaaaatatactgaaagcgacaagatgaatctatcggttgcatactacttgtatctactcgcactactatatcgtggagttttttatcagtaactgcttgctctattggcgtcaccgtcactttagcgttgtcacatccatacgaagagaaagtgattaaaccagaaacgaaccgacaatagtcaccgcgcctatccataacactgctatcgcataatttattagattccattaaataggtagagacagttttttcaataaaccctcccgtagaatgaaggctaatgccaagattatgattgacacgattctcactccaggaaacatcaaatgtatctacaggcacagtcgggcataccgtactattggccgttggtgcgcgataagaagcgccgtagtccgtgaccacactgtataccgatgccagccaggggcaaccaaaatcatctgcggcatcaatagtaatgctgaatgtcagatattgacaatttcgaccactgggcaaaccagggcattgggatgcgcctgcattaccaaagccaactatttgtataatgggagcagctccggggccaggccactgatctgtcaccagataatcattatttctggggacagcatgcgggtcataatatttcgctgtataagcaccatttcttggtgaaattatagtaaaataaaactccatcgtaggatcagattgaccgctcgcgccatacagcacatcgacactaccaaacgtaacacttgcctgtacactggtactactaagccatgtaatcagcaaacaaaataatatccatattgtcttcatattataaatactcaaaagttgccgtcgctgtagcagtgaaattaccgagcgtcacatctcgcccactttttgcctgaacccaggtgttaaaaagcaatgtattactgccatcactcaaaacaaacgtcgcaccagagttattattgatcttcactgggacaccatccactgtctcaataccaatacccacaccttgcgcctgtgagtctgaatcaagagctaaaaatccaggttgtccggtatcctctgtgcccgtaaatgtcaccttaacgctattttgtgattgtgaagaccccttacagttttctagctcaaaagccattgagactttacctgactgcatttgtgtactcagatctcttgagctaatcgtcggaaagcgaacttctgccagtaatcctccaggagcgaccaacgtgcatgatttatcaatcaaatttccggtgaaatgaaggttgtttttcgcgctcgtcgctgttccttgagctaacaacactagccccagtaaactccccgctgtatatctggtgtagtaggtttggtttcttgtcattggtaatccacctgtaatgtggcataggcttcaaatgccccttcactgagcaccgctccgctttttttcaccagtaccgcatgtagtttcggcagattagtttttgaaatatttatcgcctttccctgttgaaaacgctgaccgttttgctgcaattcgacccccagccccaccacgtccgtctctaccgcagagtcattaaaatcagtttctactcccgtccaggtcagcttcatttgtattcctgtatcggtattctcagagtcacattcaacgctataaggcacttctcgtttatagttatcaccagagatgtcactaataatgacctcattaaatgcaatctcaatcgtcttattttcactgacgatgcatgttggcggcgctatcaaattgccatgaaacgttatatctggagatgagctaaccaccgttgcgtaacttaccagcatgataaaaaatgcgatctgtttcattgataatcaaccaccatagttgcagtagcactgaatgcagaagataccagcgataccccattctgcttcacgggtacagcttcaagcgttggttggttatcgatgctaaatggtagccaggcactgcttcctaccgtaataagcgagtcattcgtagcgttttgaatacgaataccaaacccatcaatacctgtattaagcacagtttcaccattgatgacgcttgtaggaccctgcaactgcatacgtaagtcatccgcaccagtaagtcgttgcccgcagtccagcttgtaagttactggctgcaaatactggctgccatctatacgcctgatgagcacatccccaaaatcgacatcgctccccgtaacggtacatggtggaggcccatctacctgtacacgtaaaaccatatttactggcttactgcctgcgtaagtcaattcccctaccgtagtgcagatcagcagccccccaaccatagtcagtagaatatttttcatccgttatctcttaacctcatcccttgagactttgatctttatccacctggcatgtgttgccgtcacagcggaaaaagagtggcatccgtgcgccaaagtcgttgacgtaagtcagcaccggtacgctatccattttcacattcagcggaactgtggttttcggctcaatgaccagaggcgagaaccccgtagccggattaccgtttttctgcgcactggcgttgctgatgatcacgtagtacggcgttgggttattgacggtaaatgcctgaccgctgcgggtgagcgtcaccttgtgctgccacggacttttcatactgaccttttccagcgcctttggtcgccagaacaacttgatacgcgtttgcagcgcgatttgcagggtattgggtttgtttgattttggcgggatctcgcgcacgttaaagtagaacatgctttcacgatcggctggcaatttgttgatatccggcattccctgcacttttacctgcccgttcatcattgaatcgatgcgttgcactggcggcagcacagttaacggcgaggtgatcttgttacccttttcatcttcaatccagctttgagccagataagggagtttcggatcgttattacgcagcgtcacgctgattgatttgtcgctttcattaaatatcaaacgggtacgatctggcgttacagacgccagggcagacaaactggtagcgctaagcagtaacgccagcgtcatagcacccaatttggcagagcaaagtaaatcagacatggatcattccttaatcacgttattggttagctgaaacagaaacagggggatcggtgggtgtcacctgttgcgtctgctcctgaatgacaggctttatgtcatcaggaacaaccggcgcgacgttgcctttatgctggcatggcagtaacaagccgttaaacagatcagccggtaacgggtccggcaggttgatatcgcaatgcgcaacaccactccagaacacgctcatatgttcgccaggtttcaccccagccagataaacattgccgtcatcatcgacaaggcccactgtctgctcgttatcattttttacttctgcgccaaacggtggatggctgccatcttgtaaacgcagcaccgccatcgctttttgaccactgatgacggcaaatttgcggtagccaatggctccttcagttagcgtggcttgcaccaccgactgggttgtttcggcgttttccggcaatttgttgaggtcgatatacgcctgattgcgataataattgttaacgtcagaaacgacggctttaccaaacatattggtataaacagcagccccgttaccttccaccggaacatcggcaacaccatcggcatcaatcaacaggcgcgtcccgcccatattctgggtacggtgaagtgcgccgccgtgggtagtaagcgttgcgccgccctgtaacgacaagcccgcagaggtgtattgcccttcatggtagttcgcactgaggtcaacctgcgccagcgaaccatcatggctgtagtagctatcaacgctggtgtgtttgtcactggtgccgacgttcaactgatagtgagtcgcgtcatcgacacggctaaaataaccgacctggctgctgtccgtcccactgccatagttgccgttatagctaacggtactgttgtcgccccacggcatactgagcgaaatgtacatgcccttatccgcccggttgtcatactcgtagcggtagccagtcagggaaacgctcatattacgaatgctgcccatattgaaatagtgggagagcatgatgttgtagtttgtctgctcctcacgatcccagtaggtatggcgggtatagttgagataaaccgaaacacccgcatcgcggaagttctggttataagtggcggtgtacatctctttgtcgttgcccgtacggaccatttcgctgtcactggcatccagatactcgctcatggtcataaagttctcttccgagaagcgatatccagcgaaagtgacgcggctgttgagctggtcaaagtctttggaataactcacacggaaggagttaccgtccagcgaacctttgccataagcggtgtctttatccagtttggtatgcgaatgagtaacatcaaacgcgaccgcgccgaaggtagacaaatcgcgaccgacgcccagcgccgcagactgatagttttcatcacccagcgcaccgccatataacgaccagccgttagcaatcccccaggaagcttcagcaccagagaaaaatcccccctcgacatggtggccccactcttgcggacgtcccatcatgatcttatagcgaacctggcctgggcgagtgaggtatggcatcgaggcggtgctgatgtcatattcctgtacctggccgttctgttcttcaatgcgaacgtgcagcgtaccggagatagaatcaccaagatcctgaatacgaaacggtccagccggaacctgcgtttcgtaaatcacacgccccatctggctgacggtcacttttgctgtggtgtgtgccacgccggaaatgtctggcgcgtagccgcgcaggttgggaggcaacatttgatcgtcagtgctgacactgccaccaacataattaaaaccgtcgaaaatatcggaattgaggtaatcttcgcccagcgccagtttggcttttaatgacggtaacgcccgccaggcataatagcgactccactcccattttttttgtgtgtcatcgccgctaaattcctcgtcatcatcattactgcgggtatgttgatagttggtctgccagtcagcgcgcatacgccatggccccaggttaaccccgaccgtcccgttgccgctgatctcgttactgtcatcgccgccattttcttcgtgtcgtgtttgcgcagtgatgctgtagtccgcaatgatcccggagatgccatcatcccaacgagaaggtggatcccagtcgggccaggtatattcgaggtaagcctgcggtagtgaaatgactaatgcggactggcttaaatcagccttaatttccatgccttccagttgaccgggcttcaggcatttaccatcgtggctccattgcagatttttcgccacgtcttcttttaaaccaaactgcgccaccagttccggtgtcagacaagcatagcttttgctaacgtcatcttcaccagcataccagtaaatatcgtactcttccgccaatggctgtttatttagttgaacctgtaaattgtattttccgggctcaacatatccctggctggaaaaacgcttcagatcaatttttgtgtcgccttttaattccagaaaacgggaatcaaactgaatgtcgtcttcagcccagacactgctataactccctgacattgccagcgcaatgcaccacggaagaatccgtaatcgaaaaagagaatggtcaggcatacacgtttctatccgtttttattcttgttcggtcaaaatccatttaaatcccccatagcagtgtcgctatgggggtatgccttacaggtaagtaatctggaaggtggtatttgcttcgaaattacccagatctggggcatcagctgcgccgaccagccaggctttaaagttcagtgtctgcttcgctttgcctttattggtagaagtgtctttcactattttctggtcaatacccatgccgcttttgtaagaggtacccagagagtcaccgatcgccaggctaacattgttaaatgccgcaccggtatcggtattgaaaatggtgtaataattgccgctatttgcagaagaaacggtaccagtaaaggtagtggtcattgtttcctgagtatcaaatacgcaatcttgcagacgaatctggaaacttttcggcgtggtggtgccgttatttttcagtttttcggcaccgatatcacccatatcaacttccagtttgtgatcgtccgggacgatagaacacactgagtcttcaatggtgccgtaaaaacgtgcagtaccgttgttacccgcagcgattgttgctgtagaggtgaacgcgcccatcaccattgccgcagcaatagctgttttaacaaacttactcattatttgtccttaaactataaataattaaaaatataaacattgcaatacattgattcagtcaatagccaatgtttatacccagccattgaatacggcatgcgatccaaaaagaacaggtcgtagaaaattgtattcgttggtgtggggccgcatagtgatgtttccacacccctgatgcaatttaattttactaaagagtaaatgtagatttaattaatatattgacagaagaaaggttatcttaaggacatccttaaaaaatacggaataagtatttagaaaaaatagaaagtatatcaataatgaatatcaacagcttaaaaaacaaacaatgaacatataatgcgattggcatttatccacttttgacaatataatatataaacactatagccagaatttaatcaagtttcaattacatcctgcctgattattcaactctattttctctattatctgtattaataaatgacaatgagtgtcaaacagacattattcatttcaacatgttactttgggcaaaatcaagatacgcgcagaaaaataatttccgaatgaaattagaaagtgttttatttatatatggggagagtcttcgatagtagtgaggttgacagatatccgctgcctgatgagcaattatgcccaatgaatctacctcattgggcataatttggaactcatcagatagcttttgccatcttcagattacacgggctcatctgccagttgaatgtgccgtttccgctttcatcaagcgttacgctggcaatggccgaggtggtaaacataggcggcgtttcgcccggacataactcggcaaccagatacccgactaacggtaagtgagagatcaccagtaccgaagcaacaccttcattggtcaacgcctgcaaataggcactgaccagaccaacatcgccgcagggcgttaactccggcagaacttctgcactggaaggcaggttcagacaatcccctacttcttccagtgtttgctcggctcgcaggaacgggctcaccagaacgcgttcgatttccactttttgaccttttagccagttcgccatcaggcgagattcgtcacaaccattagtggtcagaggacgaaccgaatcactggcggcatcgagggctgcgtcgccgtgacgcatgataaaaacttgcatattgcaccgcttttgttaaccagattcgcccattttctttcatctgaaaccagagaaagaaaacggtggccggcattgtgccttatccattcaccgaatgaaacgctgttttttacctcaatggcgtaagtatagtcaatatgcgtttacattttgaccaacactccgccattcagcgcggattcatatagctttgaccttcttattgcaggtcagttgcagttgttttccaaaaactttccccacgcgcgcccatctcgaccaaacgctcgcaaggggtaaaacgggaaccatactgcgtggccagtcgttgcattattgcaaccacttcgcccgcgccgagagaatcgatatagcggaacggtccaccgagaaatggcggaaaaccaatgccaaataccgcaccaatatccccgtcacgcacgctacggataacctgctcatcaacacaacgtactgcttcattcagcatcaacatcacacaccgttcagcaacctgcggtgcggagagtcgcccctgcccttgtgcgccaatgagcgggtaaatggcaggatcgacctgttttttgcttttacgccctttctgaccataaagatagaaaccccgaccattttttctgcctttgcgatcgtcgttcaaaattgaagaaacaacatttgcaggcgcgctaaaacgttctccataagcggcttccagtacaggaataattttagtcccggtgtcgattcctacctcatccaaaagttggattgggcctaccggaaaaccaaatttcactagcgcagcatcaatgtgctctacccgttcaccttcggtcagcatgcggatagcttcattaatgtaaggcgctaagatgcgattgacgtaaaacccggctttgtcacgcacgacaatgggagttttgccctgttttttcgccagttttaccgtagtggcgatggtttgcgccgatgtacccgcatgaggaataatctctaccagcggcattttttccaccggactgaagaaatgcaggccaataacttgctcaggtcgcgcggcgtgagcggcgatatcaccaatcggtaaagatgacgtgttcgaagcaaaaatggtatgagcggcgcaattttgctccacttccgccaccatctgttgttttaattcgagattttcaaacaccgcttcaataatcagatcgcgatgggcaaagccgcgatagtccgtcgttccggagattaatgccagctgtttgtcacgttcgctggctttgagatgacgacggcgaactttgccctccagctgatcccaactgtacttcagcgcatgatttatgccctgcgggttgatatctttaattctgaccggaagccccgctttacaagcagtgacataagcaataccgccgcccatcaagccaccacctaaaatccccacgctgtttaatggcgcaggcggcgcatcactgccgggatctttcttcacgtccgtactggcaaaaaagatactacgcagagcctgcgattgcggcgtcatcgccagttcgccaaacgcccgtgcttcagcgtcatagccactgctggtgccctgcgctaatcccgtttcgacaacctccaggatgcgttctgtcgccggatagttaccttgagttttgtgttctgttttcttgccgaccattttgaacagcaacgcacgacctaacggccccgccagaatacgctcgcgtacaggtagagggcgggaagatggacgatcctgctttaccagctcaacagcggcttccagcaaaatggagtgcggaacgacgtcatccaccagccccagctttaacgcctgtttcgcccgaagttgttttccggtgaggatcatctctaatgctgtgctgacgcctatgagacgcggtaaacgctgggtgccgcctgaaccgggtaacaatccaagttgtacttcaggcaaaccgagcaccgttttaggatcgtcagtacaaacgcgaccgtggcacgccagcgccagctccagcccaccgcccaggcaagcgccatgaatagcggcaataaccggaatgggcaaagcatgaatctccgccatcaactgttggccctgccgcgccagagcttccgcttcttgcgccgttttgcagttgccgatcatgttgatgtctgctccggcgataaagttgtccggtttagcggagacaaacaccacgccgcgcaactctttgttttcacggagttgcttaataatggcgcgcacctgcgaggcaaactccgccttcagggtattcattttctcacccggtacgtcgatggtgataacggcaatgttgtccagacgaacattaagggtaaacgctgatgtcatttccattattccgcctccagaaccattgccgcgccaagcccaccggcagcacaggcggtaactaaaccaaatccaccgccgcgacggcgaagttcatgcaatgtctgggtaatcatccgcgcgccggtcgccgcgaagggatgcccgtaagcaatcgaaccgccaagcacgttaaatttgctatcgtccacttcgccagtggcatgtgcacgccccagtgcttcacgagcaaaacgttcactacccagcaactgaatattcgccagcgtctgagctgcaaaggcttcgtgcatatcgatcaatgtcagatcgctcatcgtcaaaccggcacgctccagcgccagcggtgttgaccaggctggaccgagcaacatgtcctgccagacatcaatcgcagtaaatgcgtagctgcgcagataccccagcggcaccagccctaattctttcgcccgggattcagtcatcaggatcaccgctgccgcgccatcggtcagcggcgtactgtttgccgccgttaccgttccgtgtttgcgatcaaacgccgggcgcagctttgcgtaatcggcaagcgaggaattactgcgaatattgttgtcttcgacaagcggttgtttataaggagggataaaggcagtcatcacctcttctttgagttttccgtctgaccatgcctgagcggcacgctgatgcgaacggtgcgctaatgcatcttgctgttctcgggtgatgccgtaggttttcgccatttgctctgcggtgtcgcccatccgcaagccggtagaatattctgctaccgcaggtggtacgggcattaagtcgcgcaaacgcaggcgagagaagagtttcagtcgctggctcatggtacgagctttgttgacatcaaccagcacgcgcgccagttttttactgacgccaattggcaataccgaagaggaatctgccccaccggcaatccccgctcgaatagttcccgccatcaggctttctgcgacgtttgcaactgcctggaaactggtagcgcaagcgcggctgacgctgtaagcatcggtatgtacattcattcccgtaccgagaacaatttcacgcgcaatgttgggggcttcaggcatttgtacgacctgaccaaagaccagttgttcaatcacttcggcggggatctcgctgcgtgccagcagttcgcctaccaccatcttccctaaatcaaccgcgggaatgccatgaaaagccgtcgcctgacgggcaaaaggcgtacgtaaaccgctaacaatggcgatacgatcgccctggcgggtaaccagcggtaaaacctgacccataacactcccctgtaaaaaaataaataaagtggtctgacctgatcatagtcttaaccatttttttacatttagccaagtggagaaaagggaaagtgggagctatgacacagagagaaaagaagaagagaaaagaaaacgcccctgccagcaactgacaggggcgtacgtacccgagaggaattaacgcagacccagctggaaaatcagcatttcagcttcgcaggcaaaagtgaaatcgatatccaggcgcacaccgtcagactcttcagtgaaagtcggggtgattttgcaaggttcagattccacgctacgggctttttcagtcagcgccgccagcgtttgctctgcttctgcgcggtttgcaaacacgcggctgtaagacgcggtgcagtcggagttgtccataatggtgccaacatccatacagcagcaaaccggggtttcatcagcactacatttactcatcgttgatttcctctgtatgtgcacccaaggtgccagataaacgttgtggatattttacgcttccggaaagtgctgctccagttgttaattctgcaaaatcggataagtgaccgaaatcacactcaaaaatgatctaaaacaaaattcacccgaatccatgagtgcgccacctccaaattttgccagctggatcgcgtttcttagatcatatttgaaaaaagatagaaacatacttgcaacattccagctggtccgacctatactctcgccactggtctgatttctaagatgtacctcagaccctacacttcgcgctcctgttacagcacgtaacatagtttgtataaaaataaatcattgaggttatggtcatgagccagaaaaccctgtttacaaagtctgctctcgcagtcgcagtggcacttatctccacccaggcctggtcggcaggctttcagttaaacgaattttcttcctctggcctgggccgggcttattcaggggaaggcgcaattgccgatgatgcaggtaacgtcagccgtaaccccgcattgattactatgtttgaccgcccgacattttctgcgggtgcggtttatattgacccggatgtaaatatcagcggaacgtctccatctggtcgtagcctgaaagccgataacatcgcgcctacggcatgggttccgaacatgcactttgttgcaccgattaacgaccaatttggttggggcgcttctattacctctaactatggtctggctacagagtttaacgatacttatgcaggcggctctgtcgggggtacaaccgaccttgaaaccatgaacctgaacttaagcggtgcgtatcgcttaaataatgcatggagctttggtcttggtttcaacgccgtctacgctcgcgcgaaaattgaacgtttcgcaggcgatctggggcagttggttgctggccaaattatgcaatctcctgctggccaaactcagcaagggcaagcattggcagctaccgccaacggtattgacagtaataccaaaatcgctcatctgaacggtaaccagtggggctttggctggaacgccggaatcctgtatgaactggataaaaataaccgctatgcactgacctaccgttctgaagtgaaaattgacttcaaaggtaactacagcagcgatcttaatcgtgcgtttaataactacggtttgccaattcctaccgcgacaggtggcgcaacgcaatcgggttatctgacgctgaacctgcctgaaatgtgggaagtgtcaggttataaccgtgttgatccacagtgggcgattcactatagcctggcttacaccagctggagtcagttccagcagctgaaagcgacctcaaccagtggcgacacgctgttccagaaacatgaaggctttaaagatgcttaccgcatcgcgttgggtaccacttattactacgatgataactggaccttccgtaccggtatcgcctttgatgacagcccagttcctgcacagaatcgttctatctccattccggaccaggaccgtttctggctgagtgcaggtacgacttacgcatttaataaagatgcttcagtcgacgttggtgtttcttatatgcacggtcagagcgtgaaaattaacgaaggcccataccagttcgagtctgaaggtaaagcctggctgttcggtactaactttaactacgcgttctgataacgcgttcgcctggataaagtcacctgcatagcaggtgactttaactcccccacttcaccgaaagtagtgtcctcattgcttacctcctgagttttgcaaacagcctgacgtcagcttaccctttcaaatcaatcagtggtatccacagacaaacctgaaggggaacgcattttttcaggcgttctgctcgtccttctcaaagagtttacttttctgaatttccaggatactcaccccccctggatattgtgcgctcatacacgcaaattaaagataggttctaaataaatgagcgttttttgatagtctattttattaggtaatatatatttgtaacaaatcaatcaacatggaataaaatcatgctaccatctatttcaatcaacaataccagcgctgcttacacagaatccatcaatgaaaataacaatgatgaagttaatggattagtacaagagttcaaaaaccatttttaatggtaaggaaggaataagcacctgtattaaacatctacttgagcttataaaaaatgccatacgaggaaacagcaatcctgagagaattaatatcaataattccgcagttacttatatcgatattggctccaatgatacagaccatattactattagtatcgataaccaagaaccaataaaattacctgcgaactataaagacaaagaactcgtccgtactatcattaatgacaacatagttgagaagactcatgatatcaataacaaggaaatgatcttcagcgcattaaaagaaatatatgatggagatcctggttttatcttcgataagatatcacacaaactcagacatacggtaacggaatttgatgagagcgggaaaagcgaaccaacggacttatttacctggtacggtaaagataaaaaaggcgactctctcgctattgtaattaaaaataaaaacggaaatgattacttatctctcggttactacgatcaggacgactaccacattcaaagaggaattcgtattaatggtgatagtctcacccaatattgtagtgaaaacgccaggagtgcttcagcgtggtttgaaagcagtaaagctatcatggcagaatcatttgcaactggttccgatcatcaggttgtaaacgagctcaacggggaaagactgagagaaccaaacgacgtttttaaacgttatggtcgagcaataagatatgattttcaagtggacgatgcaaaatttagacgcgataatgtaaaagaaataatttctaatttattcgctaacaaagttgacgttgaccatcctgaaaataaatacaaagactttaaggatctcgaagataacgttgaaaaaagacttcaaaatcgccaggcgaaatatcaaaatgaaattaatcaactatctgcgccaggtgttaattttgatgatatttaaaattatttttccagttttttgatttttcaacgcctgaatatcggaaatagtcagtgacgaacatcagtatttttacatcattacgtccgggtcattgtcggtttatctccttttacttgtggtaattgagggataacaacaaaaaaggtgagttttgcgactcaccttttttatttgtttcttattcagaatcaatatcttttaaatcatcctgaatcgcttgtgcgttcggattttcctgcggtttgagttcgccgccattagcgatgaaatcatgacgctggaagtacgcttcgcgcaccataatataaggatcggacgactgacgcagcagaccatcggaatccaacaactgcgcacgagtttctatcccttcaagcgtccatttacccacagacatcggccaggtcagccaggaaagaaccgggtaaagaccatccgccatatcaccaccgtcatcacgcagcgtgaagctaccgtagaacggtaactggacgtaaggcccataacccacgccataatgaccaagcgtactaccgaagcggtgaggttcagtccgttgcagtttcgggttcgccatccctgcaacatcaataaaaccgcccatccccaaaatggtgttcaggaaaaagcgggtaaagtggaccatcccctgataagggtcgccctgcaagaagtagttaaccatcaccgcaggttcttcaaggttgccagtaaagttgctcaaaccgttacgcgccggttgcggaacataatcacgccaggcgacagcgaccggtcgaacaatatacgggtctaatacattgaagttgaagttgtacatggtgcggttgaacccttctaacgggtcagaacgcccttgctgatctgtaccggaactcgcacaccccaccagaagcgtagttcccagagcaagcgccgacaggcgaagcttcataaatgtctccctgtttttttatggcttatgcagtttgccatccatgacggaacgataccgtatccgcctgtttaggtgtgggcgattgtaacagcacgtcaactgatgtccagacgccctgatttgctgatttgatcatagcctggtaatcgccgccctgtaggctacttgattttatagaaacagaaaaaggcaaacgcagccttttctacattttcagagtaactcccgtcagttgcgagcaaaaaagccgctacgctttagctatacgtgctaattcaagagaagagaccatggacaacgacaaaattgatcaacacagcgacgaaattgaagttgagagcgaagaaaaagagcgcggcaaaaaaatagaaatagatgaagaccgactcccctcccgggcgatggcaattcatgagcatatccgccaggatggtgaaaaagagctggaacgcgacgcaatggcgctactgtggtcagccattgcggcgggtctgtcgatgggcgcttcgttactggcaaaagggatatttcatgtcgaactggaaggtgtgccgggcagcttcttgctggagaatctcggttatacctttggttttattatcgtcattatggcccgccagcaattatttaccgaaaataccgtgactgcggtactacccgtcatgcaaaaaccgacaatgagcaacgtcggcttacttatacggttatggggcgtcgtgctgctgggtaatattctcgggacaggtattgcggcgtgggcatttgaatatatgcctatcttcaatgaagaaactcgcgatgcatttgtcaaaatcggcatggatgtgatgaagaacacccccagcgagatgtttgccaacgcgatcatttccggctggctgatcgccactatggtttggatgtttcctgcagcgggtgcggcaaagattgtggtgattatattgatgacctggcttattgccctgggtgacaccacccatatcgtggtcggttctgttgaaatcctctatctggtgtttaacggtacgctgcactggagcgatttcatctggcccttcgcactacctactttagcggggaacatctgcggcggcacctttatcttcgcgttaatgagtcatgcacagattcgtaacgacatgagcaataagcgtaaagcagaagcacgccaaaaagcagaacgtgcggaaaacattaagaaaaattataaaaacccggcataaatggcgagggtttaagcaatcgagcggcagcgtacttaccccgcactccattagcgggtatactcatgccgcattgtcctcttagttaaatggatataacgagcccctcctaagggctaattgcaggttcgattcctgcaggggacaccatttatcagttcgctcccatccgtaccagtccgcaaaatcccctgaatatcaagccttccgtagattcacagttcgtaatggttcgcgtcagatcgttgacagccgcactccatgacgggtaaaaagtggataaaataattttacccaccggatttttacccatgctcaccgttaagcagattgaagcagcaaagccgaaagaaaaaccataccgccttctcgatggtaatggcctgtacctttatgtccctgtatccgggaaaaaggtatggcagcttcgctacaagattgacggtaaggagaaaatccttaccgtcggaaaatatccgcttatgactttgcaggaggcaagggataaagcatggactgcgaggaaagacatctcggttggcatcgatccggtaaaagcgaaaaaggcttcgtctaacaacaactcctttagcgccatttacaaggaatggtacgagcacaagaagcaagtctggtcagtagggtatgcgactgaacttgcaaaaatgtttgatgacgacattttacctatcatcggcggccttgaaattcaggatattgagccgatgcaactgctggaagtaatccgcagatttgaagatcgcggtgcaatggagcgagcaaataaagcccgcagaagatgcggtgaggttttccgttacgctattgtcactggtagggctaaatataacccggcacctgaccttgctgacgccatgaagggataccgcaagaagaacttcccgtttcttcctgcagaccagatcccggcattcaacaaagcactggctacattttcaggaagtatcgtatcgctcattgcgaccaaagttttacgctacacagccctcagaacaaaagagcttcgttccatgcaatggaagaacgtcgattttgaaaacaggattatcaccatagacgccaatgtgatgaagggacgcaagattcatgtggttccgatgtcggaccaggtagttgaacttctcactacgctaagctccatcactaaaccagtatcagagtttgtttttgccggacgcaacgataagaagaagccaatctgcgagaacgcggtattgcttgtgatcaaacaaatcggctatgagggtctggaaagcggtcacggattcaggcatgaattcagcacgattatgaacgagcacgaatggcccgctgatgccattgagaagcaactggcgcacgctaacagcggctccattcgtgggatatacaatcacgctcagtacatggataagcgccgggagatgatgcagtggtgggctgattggattgatgagtagattcttatacaactttccattgcgcatcgccgatcagccacgcatcaaacaagctcatatatcgagctcgcaaacgacagaccttgtaatcttcccctacaccatccaatgagatcggtttacccaaaaatgtaagagaggttaaatttcttccccgtaatatcaactcgatttcctgcccgtcataagcctgcccctgagtggtaatgtttgccccgttggttactgggatgtaaaacgaactatggccgcttcttaccggaactggtgctggtaatgtaattgtgcgaatgtcattttccagaccactcactacagcaccactcacatcaccgattagggcggttaggcggtcgcgcttatgctcaattgttaagcctgagttgctgctgtctgcatcataaaagccagttgaacgatctccgcgtaggtttacgttcatcacacggcagcctgatgtgttttttgctctgatgcaaacagtgccgcttgtagatgagtgatgagaactgcttactaaagctcccctggatgatgatagattgatatccgcaattttacatgcctcgtaatatgtattccccattagctctgttcctatggccccgtgatccatagttccatatcgttcacagttctgtataaaaccaccatctaaaactaccgccgtagtgttaaacgttgtcgaattatcgacatcaattccattcaacccgtttcttatcactaggccatagtcagggaggacgccgcctgggtcactactgtataaattgggattgaggatcttgcaggcattagcgccattctgatagataagcctcgtagaggctgtcccaccattcattatttctggattgtcatttttaagcccgtagcaaagcaagccaactctcatgccaacgcagtcccggcctaactgcatatctacccacaatccaaaaatgcccgagttattacggcatttgattaaatcaattccgacaactccagcctttccgttaaaatcaattcgagggttatgcacctgtatatttctaatataatcagtgccagcaacagctggatcagctttaaatagcgtaatattgtctctatttgcataaaaaatagcgtctcttgactgatggatcgttgtattcccgtaatagtaatatgttgcatctaccggataaattcctggcatgaaataaatatctccaccagagctcagtagcgactgaatatccgagtgagaataacttggctcaatgataacggcagatcgggttagtttttttggagcgtagtcatcatagatgctttgcccaccccatgaactccctactaatttgtcccctccagaagatgccaatctcttctcaaactgatcaggatcatacttcagcacattcggaaaatagaactgctgcacaccgtacgcatcataaacagccatagaatggccctgtacagtaacgaatttggcaatctgcccgttatatacaggatatccagccgcattgataactattggctgtgagacggcaatatgagaaccgtcttcgctccttacataaaccggaatctggttttctgaatttaccggatcagtatcaatctttccgatataaattttgccattagctacagctttaaaagaacgcgccatagtgaagagttgcgaaggcatactcactacaacattggcatttattgaatctgtcatttgatttgctccagatacaaggaatggccgcagcatggctacggtgaattttgggcataaaaaaacccagccgaagctgggtcgttgcgttggttatctgtcagtagttatgtactgaaggaggtaattctttattcttaagtcttatccatgcggaaagattcgttggtccgtctggctcattgatatcaacatctcgtgtgtgattaattaaaacatctctcgccattccgataacatacgagaattcatgaccgtagtcgtagcatctgccggaatagttcgattgaatttgttttagcgccggatacagttcgcggaataatgcctgtgagcggttggcataatcccataaccatacaaggctgtttgcttcttttgcagaaagctcgttggttttcttctcttgtttgccgatgaattcgccttcaagcactaccctgtggatgtactctacggcttgcggtatctgagatgcatcaagctcttcaatactttccacattgaaacgctgatgaatcattgcataagcttctgggtacattagatgctttttgctgaccagcatatttacagcatcacgaagcggagtcctgtcatcaacagatgttttcttacgtgcattttctgcctctccctttgtccagtagtcatgcagcacagtaaagcattcttcctggtactgaatcagtttatcgcggatgtcagcacgaactttctcagggttgatgctgaacagccatccatttaacttcttcaaaggaaggcagagtagcttacgaagcttaccatcagcggcaaccatattcatatgaatacagttgaacttatctagttgtttcataagtttctgttgctgagtaccccagctcattccgaggttttcaacgattggcttcatcgcaacatatgcaactccggcagccatggcggttaaaatctgctgaccattgaaaggcacgtaagaggtgttcactgcttctaaaattgctatactattcatgttggtttttctccacggatttaccgacaaccgaagccctgactgttaccgcagttggggcttcactgtttttgtaagtcactgtagctataaagccactgaccactcatttttgatttgattgactctactgagtcacggcaaggaatgattccgcctgacatcattctgatctccgtaaattcaccactccttatcgattcaatgccatcaatgttaactaaagatttacctctaccaagtgcattctcatagccaatctcatcaacctcaataaacctcataccgttatcccctctctcttcaggctgtccaacactcgcttgtaaatctcagagttaacagatcgcccgttctcttcagctaccttgcgcaccaaatccaatacttctttaggccaccgcaaattgaactgaggcatttttcttgcaccttgcatattcaactccatttcactcattgatagtaccgtgctactattgaaagcgtactactaccgttctagcatgtcaacaaataaaaggagaacgacgtggctagaaatgatccacaattcaacgtaagaatgcctgatgagataaaacagcaacttacgcatattgctgcaacaaatcgccgctcgataaacgcagagattatttcagctatcgaactatggataaaaattcataaagggcagctaataccttcaagtagtcgaatcctgacaaagtctgagcaagaggcgtttgatgtagctattgatgtgttaaaacgtgtaagagatggaggataaccatggagcaacaacaagggtcgccattatcattgattattatggtgatttttttcgtttttatcttttttatacctgcgttaaaaatatccaaaaaggccgggtttgactggaagatggctgtatgtttaacaatccctggctttaacgtggtggcgtggctcgcgcttgcgttcatggattggccaattcacaagtatctaccaaaagatgtgaatcgtaaggatgcaaaatgaataaaaaacagtttattaagtcaaaaacgtcaagcaaggaagaattagagaaggagctaaactccctgaaatatgctctgtgtctggtttactcaagactgccaatggaagataaaaacgccatttacaatgaaatgattagcagccttgattttaacgatagagacctagcatcccacctcaacagcttccgcgtccctgagtaattctgttgcggatttgcttcttgcggtggtttaagctggagagcttggcttctgcttctgatatttgcgcatctagatctttaagctcaagatctgaaagtcgctggtcaagcagggtttggttcaactcaatgttgttcaggcgttcttctatggtcatgatttctccttgttgaggttgatgtgaaacgattgattgtatacgcactcttttgttagctagtagctttgcttaatcgcaagataaagtttctgattaatccctaaaaatcaaaaaataaagttaaaacaggtacatgatatggaatggatcataggatttgttgttcttatcttcatagccagtatgtttaaaccaagaagttgcgatatctgtggtgctggatttaagaaaaagtacttcacatggactatcgatggaaagaaacagcatctttgtccgtactgcaacagtaaaatggagagacgcaacagcgataggcgctttaaggatcgatttggttaaccattttatctccaacaaaaaacccacctgacggtgggttttattagtgcttgtatagcttgaactccctgtcgagccataagacataaaaagtggctcctatcttataaccaaccataggtgccttagagcaaaatctgaacgcaatgaaatccacatcttgagtaacatgcttaggaatcggagcctttatcgcgtttctggcaattttttccgtcccaagcccgtgtttatcagattttcgtatctcatcccatgacatctgacttaacctgaacagcctatctgcaaatgctgccttttcatgcttttggcagcaatctaggcaataccccttttgtaggtatctaagagaaaatacaggcggacttttgtctacatcatgagattcgtgatggatagagaggccaacagtagcagagctctctttatccctctgttttattcttcccttaactctagacatacacgtcagttaattaacgttttgaaaaaacctttcatagaatcaagtgtgatttcttggctaaccgcaccctcaatgtaagcatctttccatggctgctcttcgtgagtcatattgcgcagtttccaggcagaaaactgaccataaactttatacacctcatccagcaattcaatttcatcttcactgaattttttagcgtcaaagttttctggcgcaggtaaagctccgttaccacagtccctatatttacgatacaattcaggaactactggcccatgcatccaggcttcaattttctcattaaatagcggcttacccagaagaaccagagaaaacccttgggcataatacgtcaacttctgaatttttaggttagagataatgtcgccactttcttcatcgcaatgcgccaagaagtagtcggcgacatcaaaacaagtgagcataaacatacctccatcttgatagccgcagctatgtatacaactgtgtcaagttgcatttaataccataacaaagctgtcatcaatccttcagaggctaacttacaaccactttctcgacacgtttaaatcattacgtttcacatttactgcattttcgccgaagttacctataaggtaatgtcacatttcctgcaagtttcatgcaatgttgaaaagtgagctattcacttttctatgacactaaacaccaaaaatagcactttttgctaaatcattagtccaagttgtggatggtttgtcgttgacacgttttcacacaccactccaccaatacagtatcatctggtatcctgctcaaaactaaggaggttggtgtgtttggtatattaacgagaagcaagataaaaaaattaagggcagaactcgccgaaacacaaaaactggcttcacatttttacaaaatgaaatacgacgctgaagagcgtgcattcgttgagttatgcgatttatctattcgtatgggagtagagccagatgtagcggcaaaaactcaacaaggcattgatatacttgcagatgttgttttaaacaggcaatatgcgttttatctaaacgagaaggccattcagatttactcgcaaatcttcctcctggaaaaaagaagaggaactcacgatcgagaagagtggttaaatgaagttgttaaaaaatctggctgggaagttgtttcatcagaactacctcttatttgtgctgatttaatcgaagaggcaaaagagcgcctatccgatggctagacgaatccatccgtggattactaattactcctgtgccattccgcttagcgatgccacaattccagatcttgctaaacgctggaactcttcgtttcctagtgcctcgcgtattgcttttacggcggccttatttgccataaatctgcgttccgccgccgctaatgcaccatcacttgccccaaccttaactgcctttgttgcctcttgaacagccttttcaatagcgtaacgaccactgcgggatgcagctaacttttctatcgtccctttagctatagatccagaaacagcccctacaacaccgccaacaatccctccaccagtagtaccaacaatagcccctgatgttgaattgcctattgcattgagaactgtcatgacagcttttggcagtccttgctcaagagagttaattgccggtatagagcgccccgtatgctctacatatcgcagtggtctggttgctgctctggcaaggtcgctgtatgccctagcaatcttacccatttctggcgagtgcctactaatggcagtaatgttctgcggcgtaaggatcgacgctatatggaatacgccagcagactctgatttaccgccacgcaccccttgcgataccgcatcttgtaatattgatgcaattgcaggagatcgctcagactctggcagcgcgccaataatctgatgaaaatttcctgtcccactttttgatgaattttgcaaggctttaataccatcagtgactaactgatcagttgcaaggtttctaaacgctgcttcagcctgttcttgtgctgtaaatcttgcttttgacagatcattagctttttgccagtcatcaagaaaaccgccattttgagccattatgcgcatatcttccgttgctgcatcacgaagctccgccatgcgccttgccgtatttgcctcaccagaccttatatacttctgctcagcgtcagcaagtttacttcgccatgccttcatggcatcaaacgtgattccttttttaccagttttagcataagcagatgcaaattgtttcatctcaggagttagcggcataccagccaaaatatcaccctgaattgtagcgttcaggtttgacattctggcctttgcgtcaggcatcgtggagcggacgctatcccatgcttccttttctgagttcttcattttatcaatacttgctaaaaccctttgttttatggctgcacttttttctgatgcagatccagcctcagcaccaagttcatcaagtgctgagtggaatttcgactgtatttcactaaacgccctagtatgtgcatcctgaacaattcctggttcggatgccaatatcccttcagcttgtgcaattccacgacttccagatcgcattcctggtgttaatgcgtttatatcaattccagcagactcagccgcttttgctacatcttcggacacattagcggcctgactggcaattgactgacgcccggcacctgactttgccatcctggaaacatcattagcagaattcagtgctgcaccaccaagagcctgtgaaacccttggcgcaataacgcgcccgacacctgaaagaacgccttgagcaccaatattgataccaccgttaatggcagcattttgtgcaaaatcaccctcctgatttgcagcatcagcaagagaaccggcaatcatgtttcctgcggaaccgatatctccagcgagctttgctgtcgctccagcagcttttgccgctgtgccaattggcaggagatacccaccaattgtttcaccggcttgcgcgtaaggatctgtcggtcggtcgactggacgatagacatcatccaatacttttggcccaccaagcccctgactgattgcattaatcaggcttgcgccaccctgcaatacgtcaaatggtatgtttaccagaccacgaccagcctgttctgcaatttgccctgcactttgaccacctgtgagccaatcgccagcttgttgcatcaatgatggttcttctttctgctgctgaggcggagggtatgctgcataaaactgatctcttgcttcagcccatttgtcaccagccttaggggcaacaacctcatcaaaatattgcgcttgagcctgtgctttctgttcttcagttaacgcctgatactgtggagaggcgataacatctttccatgctttagccattaatcaccccataaagacgagaaaccggacttattgctgtcgcttcctgattttcgctcactaacatatgtgtcataacctgatgaactatatcccattgattcagcctcccttgctgcaaccttttgaaatacagaatattgcgatcggatttcagataactgttttctgacgacctcttcaggctgtgttatatcgagtttcgcgatcaggttttccagtttttggccttcagcattggagaggctacccatacctcgcatagtctgcacgttctggacaaacgcacccgactttaattcttctatcgcattacggtttgcaagcccttcagcacttgtgaagccatctatatttcttccttcgaagcgaccgataccttcaagctccttcttaccaagcaaagaatcaattttctctatccctcgctcaccagtaatcaacgcattgttgtaattattgttgccatcaagccatctcttagcctgagacattctggctgacgttgcagctttaccggttagaggatcaattcccgtcgctgctatctgtgagttaagagacaaaacatccatatcctgaagttgtcctgctctttcaagggccgcctgtgactgcttaaacacatacttgtcgtgattcagtcttgccatttgagccttataggaaagatcctgccccctaatagccctcgcattcgtcatgtcattattgcgaatggtttcgttaattctttgctgctcctgctggcgaccaaccatcttatcctgaacagcaaaagccttttctggcccaagtgcaccgagagacatagtagtcagcatgtgtgatagctgctctggattctggatacctgtctgaatcatccagtcagcattagcaccaacgcgatttaacctgtccttgttgtcagtaatgaatttactgtaggcttccggtccctgagaaagagcgacgttagccctcatggctaaatcgcccatatcgttgcgttgctgctcattaagaccggaaaatgcctgttgtgcctgtgcaacaaatgctggattttcctgggcaaacttaaatagtcccgatggatcaccagaagcccatgcatcagcatgaaccttattgaacgcattaatcgttttctgttgctgttcctgcttataaatatcagcaactccagccagaccacgaagacctgtcagagcaacgttatttgcacctgatcgagccagttcattgttttcgcggatcagaccaagcgttgcgttaatgtcgcttgcctttggcgcattctcgttttgcgcaccaatgccagccagaaaaccaccagaattaataccctgttgccacgtagccattgattaccccttaaaacagtgaaccaagcagaccaagaccagcaccgataccagcaccccacggagttgatagcgcgagagcactggctatgccaccacccaaaagcgcaccggatgcagcaccactaaccccctgctgcaatgctgacggtcggttggcatttgccgcagccagcgccgcgctttgctgtgaaatctgactcatgttgttggcatatgtttgcccggcgtttgcctgcccctgaagagcgccaagaccgatatttgccaggttgttgtaattgttcatttgtccagatagccattgctgaccaagcgttggtgcgattgttgctaactgattactggttgcggtggaacccaatccacctgttgcttccgctgccgcaagactctgatagcgagcctgacctgaaaggtctttatactgctgagagttgtaatactggttaagtgcctgaccttgcccttccagagacgataagttctcgaggctgccgacatacttatcagccagaggagtaaacggcttcaggttgttcatgatggtgttgaactgcttattttgcaggtctgcggcatactttgcacttttatcagaactgccacctttcccgcctttttcagggtaataaggttcctcgccgcgcagttttctgcccagcttaaatgcatataacatggctatctcccgtgattcaggaagtcgattagttcttcgcgtgtggcgctgtaaaaagtcacgtcatccacgcctttgaagtatttcttgatggttcctacacgcttaaggccaatcattgcgcagtacatctgcccgtggcggaatttgcgtgcagcgaacgatgtgacgcactgaacgttggtgttagtcagaatgtatcgccagaacgccagcccgatttccttgctgaagccgcgaatctctggcaggtacatggcgtggcaatcgaatgtcagcggctgaatctcctgatagtaaacaatgccgccgaactgcccgtgcacgttcacctcaaagtaacggcaatcatgtttatagtcgtatccatcaccgttgttgctcccggcaataatgtcagggtgatttccgactgcttcgatcaagtcgatgtttcgcgttggtttgaactgaatcattactgctccgcgattatcttgatggttgtggcagtaaacgccgccccatttgactgaatagttaacgtactgccatttgtggcaagaaagccgtctttatccacgctgaagaacgtagctaacaggatgttgtcggttgttgtcgccgcattacgactgctgaccagtgtgtcaggaacagagccggaaaaggttagctgcattgacctgtttgcggttccgctgggccacgtcccgacaatcgacagcttgatgaacaaggttttgttctcgttgaacacaaccatcttgttgttaacggtgtcgaagaatggtgccaacgtgccggatgacggcgtgagcgttttcagcaggctaacaaggttggtcggcgctgtcgggatggttacagatactcctgagtaaacaacctctgatttcttgcgcgtgatggcatactcaagcgcagatattcttgttgagtgatcaccaactgtgccttgtagcgtcgaaatacttccctctgccgctgtgagcctggtatcaagtgcgtcgatatcggttgtattctgagttatgagcgcatcatggtttgctaactcagattcattggcagcaattcgcgtctcgtgatcagccagctctgtttcagcagccgtaatccttgtttcatgatctgcaagagtgctttccgctgctgcaattctatgttcatgattgatgagagttgcttcagcagcttcaattctggattcatggtctgcaagggtgacatcctgctcatcgttcctgacctgtgcatcataagcgccctgtccggcctcgttggccttgttagccacgttaccaacatcagtgccctgtgcgataacgtaaagcagatacgactgcgagaagatattgcgtggaaggattgatgtatcgagccgcgtagcctgcacaataacaggggtgttgagattcgaatcagccattactcgatccttatctggcagcctgacagagtgacaggtgacttagtgataacgcgcaatttgaagccgacatttttcctgatgcgcccgacacgcttccacaaaacacgtttgtcgtaaatgaacggttcattctgctcaatcatctgctcacgtccgtaattgatgccgtcagtggttgcagagagaaaaaggcggtcagcatactgcgcaacgccagttgacgactcaacttcaaggtcgaaaactctggcgttatccgctttgaacagtggagtaaacagcaggtgttcttgctgtagcccatactggctgctgatgtcgaactgcaatttgccggtaaccgattccagcttatctccgcacgttatctgattgccttcgtaaatgaagtcaatagcgcggtacacatcgtcatacaggcctgttttcagcacacaccattgcggaccattggcgcttgaagatgcgtcgtacacgagaacatggcgcggaaggtggataatcagcaactcatgcgcatcaaaccgcagcgattccatcacgccatcagccagttcatcagcagtgtaggagcgtagtattttctcaatgctcgcgctggcgattggtgatacctgaccggagccgatgatatacacagacggcgcacctgttgccggattgctgataaacgcataggaatcagcaaacggcgttttgcagtaagttccggcgatgcctttttgcaccatcagcgatggctgtgcgacatataaagcggcaccaacagtggttgcgcccgtcagggagaaatattcaatcgtcgatgaaccaaagcagacgatgaagtctcgccatgttccgatgccgatgataccgtccggctgcgattctgcgcgatattgtgcgctgtaacggtcaggatgtgattcgtcttcaaggtcagtgataaaccatgaatcagttccgtcttttgaccacgcataacgcccacgtaagcgcgtaatgtcgcgaactgaacctaactcatactgcgtgaatccgctgtccgcaggccagtttgagacggttttaaccgtgccatcatagcgatactcgaccagttgaccattaacgcctacagcctgagatgtccgaccatgcgccattgatacacgaccacttccggcaacatcaccgacttcgctttcgcctttgtagagctttccaccacacacgcgataaacagcattctgcgccatgttgtactcgacgccgcgcgatataccgttcacatcagaacgttttgcaatgcccgggaatgagcgaagatatccgctgctgttcaggatttctttgggtgtagccagcatattcactggcagatagtcgatatagtcggcatttcggaagtctttgccgacacctttcataagcggaagttgctgaatcggcatttattcacctcacgtactcggatcatctttctcgatgtaaaaccgattccacgtaaacgcgcttttgttaccactaccgcgaggcatgtcatttcgtcgctcaagtggtggtattttggttaaagcgatacagattgtctgatatgcactgtcagcagcggtcaggagagcatccgacggctgaatgacgttatccatgcacacttgcacagcgagcttcaaagcgacgccatcatttgcccatgcagggatacctgaatcatcgtcaggtaacggcatgatgccgttttctgtatccgcaaactgatatccaagctcgatacctttcgcctgccatgctgccatcatgtcttcaaggtcattaatggcatcttcaattgcctgagggtcagcatctgtcaacgtggcattggaatacagcccggcttttcgtaaagcctttagaacgagatcacccttcgttttcgccatcttcttccgccttagccactttttgcttcgttgcggtttcttcaggagtttttacccagccttttttcaggtgagatttaacttcttcgtcatcaacaatgatgtaatcgacagcaaactgaccacaggtgatcatgttgcccggcttatagagcattgttcgtgccattgtcttctcccaataaaaatggggccgaagccccaccaaaattactgcccggcaataacgatgcccgtatattcaggaacaagtacagagcaaccgtacagagtggtgaaacgagcagtggttacgcctttgatgtggtcgaaggcgtaagacatgatcagcgtagcgccctgctcggtggttgctgtcattacctgtggaccctgaccagtcgggaacgctagtttgccgtacatcagctcaacagaaccatcagcccagaacaggttagcaggtgctgcgttcttgttgagaatggtgattgctgctgattctgccggtttggcatcgacgtttgcatatggacgactcgcaacatcggtattttcaacagggagaatctttggagagattgttacggtagttccgctaacagccagaacacggaatacctgcggttgcccggtggtatcttttgtgatctggtgtacggaattcacaccggcaatggtgaacgcatcaccaacctgcaagccagatgcagataccgtaatagtcccctgtcggttatcaactggcataccatttgaatctttcgcttcaaccttgtgttcaggttggcctgatactgtcaaggattcagcgcttcctttcggtaatcgaccagaaatatcggtcttgtagctatcaaaggaagcaaccggagggatctgcgctttttcgtatgctgtcagggttgcgccctgagcgtaggcacggtgaccaagctcgccagcaaggtctttgtagttgaaggggttccagaaagagcgacggttgataccctgcggtacaccaatcgccgtcatggtggcatcaatacctgccgcacagttccacaaatcacggccctgtgtacctgtggttgagtcagacattgtgatcacgttagtagcacgctgcgtaaccatggaaatcaggtcagagtcaatctgtgcagcaaggcgcatacctgcggcgcgaccagcttcagttttatgctcagggtcacgcatttcacgcgcatccagagtgtacagaatgtttttcggctccttgaacacagaaggaacaaggcgctgaaccagtgctgtaggcgttttgctgctgagatcgaggccttcctcaatgttcatgtggtaatgctgcggacgatacagaacatcacctgctcgctgcattgctgtatcaccgggacggaattttttagcgttacgggaaactacgcaggcggcctcaaagccttcaacgtagttttcgaacatgatttcaaggttttttgctaattggttagccatgcttaatgctccgataggttatttttttgcctttttagcggcgaaatacggcgtccagtcaccagtttccagcgccctggctttcaatttgtcgaggttgttgattactgcgccgttgctccccttaactgtcggggttgtggctgccgtggtttttgcttttggcatgattctggccttcgattcgatacgttccagcagacgaccaattgctacggggtttgtagcttctgccagttgcttgcgcagttcagcgttgcggccgagtgccagaacaacgatttccggcttctctgactcaaacaggatcgcgttttgtgtctcgatgggaacttcctcgagtacggcctgctcagcttcctgatagccaggaactttgagagccttaacacgttgctgatatttggataatcgctcttgataggcagcctgaagctcctgctccttctgcttgcgagccatctcctgttgctggtacttgccgttatcctctgcccacttagccatgcgttgctggtagatttcttcatcgaaaccgatgtcctcatcatccagttttggcattcgcggtggttgagtgattaccggctgctgctcgacgggtttctgagactgacgcatcagctctttcagctcgcggtatttctctttaatcgtcttgcgcaggtgttttaccagtccatgctctgcgccatcttcgctggttggcgaatccagcttttcgtcaccaaagtagaattcctgttctgattcgtcgtcatcagtttcagtagcttcctctgcatcattgccggaggactcactgccatcttctgtttcgacttcttcagccagttcgacatcatcaggaatctgctctgacgcgtcggtttcgatttcaacttctggtgtgttttctgccatctggtccatttgttacccctgtttactcgatgttcagcccatcggaaggcaatagggtgccaggcctcataaagacagccattgcacgttatgggttaattactgctgtggttgttgctgagttgatttttgcaggatgctgctgatgtccatgcgctgcgcatggccttgcgcctgacttttcaggacaagctctgcatcagcacgggcattatctccttgctgttgctggaactgtccgagcagtttcagcgcctcacggatatcagatttttgctggctatcggcagatgcgaggattttcacaacatttgccgctgaaccgccccgggtttcctggagagtgttttatctgtgaactcaggctgccagatcattgtttccgatggaagcataataagctttttctgcttctgccggaggagtatggcccagccttcccagcaatcgtcgattgttataccagtccacccacgttagtgtggccagttccacttctgcacggtttttccagctcttacggtgtattacctccgctttgtaaagaccattgatgctctcagccatcgcgttgtcatacgagtcgcctgtactccctgttgatgccagtaatccggcttcttttagtcgctccgtataggccagtgacacatactgagagcctttatcgctgtaatggatggtgccagacggacgacgggcccacaacgcctgctccagcgcatccagcacgaatgtcgtttccatagacgatgagacccgcccccccacgatgtatccggcaaacacatcaatgataaacgccacatagacgaagccctgccatgtgctgacgtaagtaaaatcagccacccacagctggtcaggacgttctgccacgaactgacggtttacgcggtcacctgtggcaacggttttccggctgacggtagtgcggacctttttaccccggagaacaccggcaagtcccataaccgccatgaggcgcgccactgtacatctggccaccctgattccttcccgtaacaactgacgccagactttacgcacaccgtacacctgatgattttcatcgtatacgcgctgtatctctctcttcagccagtcatcgtgctgcgcacgggcactgcgtttatccggatgatgtcgctgttgctgacaatggtaatacgttgacggggcaatatgcagttcgctgcataccggtccgaccccgtactgctcacgcagcttatccagcagtggcatcattttttccagaggcggtcgaactccgccttcgcaaaataagcggaagcctggcgaaggatatcgttactgcggcgcagttcacgatttttcacgttccagctctttcagacgctgacgttcagcgctggtgagcccaccatcaccgcccccggtatcccgctcatgctggcgaacccagacacgcagagtctccggcgtacagccaatctttggggcaatggaacaaattgccgcccactgtgagtcatattcatcctgactttccagaaccatacgaatcgcccgctgacggacttcgggggaaaaacgagtatttttagtcatcctgtttacctctttctcagggagtttagtctccaggatttccggggcggttcacgctgcaacctgagcatccgtctgtgcctggaatgctttaacctgaatggctgcctgctcgttctgcgctttctgcaattcagcctgaccagcaagaagctgaccttgcgctgcaaccatagccggatctggctgactggcctgttgttgtttcgcctgttcaaccatctgctgttcttcaggcgttctcggcttgataacgccagacagaagcaactgattgcggttgtattctttcaggtcgtccatcccttcgccgtccatattgtcgagaatcatcgacgatacaaggtcgtgcttcggcgttcctggtgggataagtgccagcatggaaagtaacgacttaaccgttgcgtcacggcgagtagcgaacgactgaccgacatcgacagtcacttcatagttaccctgcgaaaggtcgttaagcgcgataacctgccctgtctgacggtcaaccacttcaccagtcatcagcgccacgtcatcgctgccgtcctcattaacgatacgcatcggcgtatcgctgccatagacttcacgcgccatagaaagccacacaacgccagcgcgacgcatagatttagccatgttgtccatgtagatataggactgcgtgtccatccggttaaaaatgctatcaacggtatcagtagcgacgttgctcggcatgttctcaagctgcgacgcacctgtaatttgctgaatagccgttccggtgtactgcaatagcccggcaagagctggaggcatttgtgtcggaggcgtataactgctgacctgagcctgcgcagtaatatctccgtttttgtttttcagactgaccatcggcaggaacgccgggcgctttttgttgcgctccgcccaatgagtggcgagaggaccaggaatcatgtcaacatcaactacaggaatgccatcaccgccagcctgagtagcgttatctgcaatcatggaaaccatcaggttctcaagacgctgtgcatccatcgcttttgctgcgtgtccttcaattcgctcctgattatcaacaaatgagcgacgcccatataccgggatgagaggaatatgttcgcccggaatacgcttcggttcttccagccattcagcgccagacagaagaccgcaataaactcggcgtttcttcactgtccgctcaccaatcagttcgaatgcaccatcggtcagctcgtcgacaatatctttgatttgctcttcatcatagattgccgtttctccgctaacagggttacgccatgctgtgagcttcaccttctctatgcgaacttcgtagtagcgaccaacatagatggcatcggtcgttgaccagtcatattgagtgccagtgtcatcacgagaaaggcttgccgcggtggaatcagggtattcagcctcgaacgctttaggcgtcatggagaacatttccatagcccacatagcatcagagcggtcatattgcttgctgtcctgatcgaagaagacgcatgttgctgggtcgtaaaccgggagaaggcttatacggcgttgctcgttactcggatccatttcatcttcgtaatcggcacacatgcggaaacaaccgaatccacccgttacagcatcatcaaatgcgttatcacacgcttcgccaccggatgtttcctgataatcagcgcggaatttgccgttcatcttttcggctaacgcttccgatgccttatcgtccttcggtctgaatttaacgctgatgcgattctgtcgatactcgccaatgatgcgatcacattcacgggcaatcttattcagttcaaaacgcggataatgctcaaacctgccttcatcaaatgagtaaccagcgtttgtgctgccttcccactgtgcgccggatacccggacgaaacgttgagcctcaataatctgctcacgcatatcctgcgttgctgaccaggcattatcaaagttgcacagcaccttgcgatgccagtcagtcatctttctatcatcagccatcatccaactccgcaaggtatgttgtagcttgagtaatcaatatctttaggatctttgatgtctcgcatctgtattgcaaaacgcctcatcatgtagccatagcgaacagcagaaaggatgtcgtcatttagcttgacgatcttcccgttctcatcgcggtgatacaggcgaaactcttcaaagaatggctcgcaggtgttaaataccttgaaacgaccgtcgagcatcatgtcgcgtatctctgctatcccgggttcgaccgcattacctccatcaggccatgttgcatgatctggcaacatgtcgaacccagcttcggcgtattgttccttgagctgagcgccgcctcccttttcgtgctgatgcccgtcatgaggccaagccgtaggggtgtttttgctccatgctttaacagcactccatgcctctgtcgccttcttctgtttggccttccagacgcgagaaagataaatcacgtcctcgtctttatcccaccaaagctggatatgtgcctgtgggtgatcccatccgaagtccattgcattgatgacgtagaagtgatcaggacactcgaacggctgacacttaatcgtctcttccggtatctggaagattcgaccgctacccatcgtaggaataccgcgagcacgcgcctctctctcatgctcgggataggatgcgatgatttgctctttctgttcgtctgtgtagtgctcagcgtcatagatggtcatgttgaccactttctgcgacttgctgggattcttcaggaacttggtaacaacgtcagacatccccatcagcggggtaaacgtcagaattgagaattgcccgtatttgttggtacgggtaagaccttcgccataaatgctgtatggtggctcttcgtcaaaccacacgccgtggattgtgtcaccctgccagcgagcgcggccttgcgagtatggtttgaagtagcagattgaaatgccatcttcaacgccatcagccgtgtgatgcttaaccagaagatgatcaacaaggttcggaaagaaaggagacttcttccagctaatgatgtcttctttaggtatggaaccgtagcctggctcatcattctcttcgatacgaccacacaggatgcgttgagtcgttttggttacagtctcgtttgtctcgccgccaatccagaagacaacaggctcatagaaacgcttacctttccactcaccgccatatttaccatcagcaggatagccttttgtgcccgggtaacgcccggtaaggtgaaacgcgacttcagcagcaccagtaaatgacttaccaagctggttaccagccataaaacatcgctctggatagtcatgcccggcgtcgatgaactcacgctgtttgctgtatggcgtaaattcatatagcaggtgtgtgttacggtagttctcttcttcttcgagtagctcgagcaattcgatttgctcttcgtcgctcaagttatcaagaatcgcgtccagttccacggttgaatagctccttgatacgagagcgccgcttatcgcgatctcccttatcaggtgtcacgtcttcaacttgcgactgctctttgaggcccaaatcacgggcgatgatgttagcgttgagaaggtcagcggctgcgccagagaatttctggtcgtagatgatgtcttccgctcgtgatgtgacgtcagaaaaaccttccattgaccggaaggttccccatgtttgcctggtgatatcaaggaaggtacacaatcctgaaatagtcatggctcgcatcttagggacattagccttaattatttctccctgatatgaaaataccttaccctcccatagcgggttatcatcagcccactcgaagtattcacaacaagcagcccacagcgcctcaggcgattcgaatttaggatttcgcccatgactactgcgggcctcccaaaatcggttgccctttggtgctgccatattgattatttcccttctgcttgcttatcccattcatcgcggaatttggatgggttgtcgaaaccttgagttgccatgtttatgctccggtagtgaacaggtctaacgcttccttcgatttacgcaccgcttcgattgtgcgggtcgtgatatctgaattagcgccgcctgactggaagtgaattttgaatagctcaagcttcagctcgtcagtgccaatgaactgaaatgcttcttctgcggctgcgttctggttcatgaccagtttgtaaatctctagctggaatttctgttcttcagtcatgggaataatctctgccattgttggctccgtttatccgttaaaagggatatcagttaagttatcccgtgtagggtataagccattatcaaagccactctgtagggaatggcttttgtaataactactgttcgcttagcttctgcttcagcaagtaaccttcgagcatccagattttgtttacagcattttgccgggcaatcttccgaccaatttctgcatcaaaattttcagggcttgcacaggcactctctccggtgacggtgaagccattcttcagcaccagtacgcagaaagtgagcaacttcaatggtgataaatcacgatcgccttcttctggtttttctctgccacaatattcgttgctggaaatggcaccatttcgtccatcataagcagtaaagtaatgctcgcttttaatcacgtcttcgatgtgctgcggggtgattcgcggtgccgttttgcctttctcaacgatttctttttcgatttgctggtcgttcataattatgtccctgtggagtggttgcttgattaggatgtctttccatcagtccgccaccacaaagaatcttttttgccatcaggctggaggttcatctttcagtggctgccagtgttatttccccacttactggcttgggttgtttcgctgtactgccgttaattagtgaccagaaattaactccggtttcattatcaagcccacccgtagataggctttgtaatgcctacatggttaaatgatttgccagtcttcagccatcaggtcgccaatggatggaacccatgtagcaaggcggttctgtgagtttttcaatacaagcgtgtcattgaaagttggctcgccaacatattcgccaaagccataacccaacgcagacgctaatttttcccctttcacgagataaacaaactggtctttcccattccatcctgcccgctgcaaacttttgccctgttttaacgcttccatggcaaggccgaaacttaaccctgataccggacgataagccttttcgaatacttcttttggactccagctaacgtagccatcaaagcgatcggtgttaggttttccgccatccagatattcaaccagatagccttcatcctcgccgttttctccggcaggaagctgccagccacgaaaatcgttatatgcctgtctcgtcatcggaaaggcgttaatcagttttacgccaatatgctgggtcataaaattacctatggagttgggaataaaaaaccccgcgaatgcgaagctaaatcctggtgtttgtgatgactggctcttatctcaacgctgccccttaccgcgcgccagatgctcaatatcaagcatcagcaatgagatgtttaatctggatttactccagaagtgatcaccaccctgtctacagagccagatgtgaaggatgatgagtaaaattatcgctatcatcgaaggcattgcgtcctgatgtattcctgaagcgttctcagtgctgtttggtcgcggataattccgtcccggacaccgagaacgtttcgtccagcaactggagagagttcgacggtggcatcattgcccatgccggaggcgctggaggtttcggctgaggatggcacagggcattttcctttgacgagcaccctgccaccattatcaagcttgcgccgaagagcatcattttcagttttcgcatcagctaactccttcgtgtatttagcatcgagtgcatcagcagaacgctggcgctgctgcatgtcagtaatggtggcggtcgcctgcttcagctcactgacttttttatcgcgctgttctttgtaggcgatggcgttatcacggtaatgattaacagcccatgacaggcagacgatgatgcagataaccagagcggagataatcgcggtgactctgctcatacctcaatctctctgaccgttccgccagcctctttgaattttgcaatcaggctgtcagccttatgctcgaactggccataaccagcgcccggcagtgaagcccatatattgctgcaacggtcgatagcctgacggatatcaccgcgatcaatcatcggcaaagcgccacgctccttaatctgctgcagcgcaacagcgtcctggcttttgggagagaagtctttcaggccaagctgcttacggtaagcatcccaccaacgggaaagaagctggtaacgtccggctgctgttgatttgagtttggggtttagcgtgacaagtttgcgagggtgatcggagtaatcagtgaatagctctccgccaacaatgacgtcataaccgtgatttctggttttctgtcgtccgttatctgttccctctgaccacgccagcatatcgaggaacgccttacgttgattattgatttccaccatcttctactccggcttttttagcagcgaagcgtttgataagcgaaccaatcgagtcagtaccgatgtagccgatgaacacgctcgttatataagcgagattgctacttagtccggcgaagtcgagaaggtcacgaatgaaccaggcgataatggcgcacatcgttgcgtcgattactgtttttgtaaacgcaccgccattatatctgccgcgaaggtacgccattgcaaacgcaaggattgccccgatgccttgttcctttgccgcgagaatggcggctaacaggtcatgtttttctggcatcttcatgtcttacccccaataaggggatttgctctatttaattaggaataaggtcgattactgatagaacaaatccaggctactgtgtttagtaatcagatttgttcgtgaccgatatgcacgggcaaaacggcaggaggttgttagcgcgacctcctgtcacccgctttcacgaagatcatgtgtagaaggccgcagcgtaactatcactgatgaattcaggatagccagtggatacggctcagtttgggttgtgctgttgctgggcggcgatgacgcctgtacgcatttggtgatccggttctgcttccggtattcgcttaattcagcacaacggaaagagcactcaatgcatttaaaccaagccccataaaggagaatgctcttacctgttgcacagatataaaaaatcccgaaaccgttatgcaggctctaactattacctgcgaactgtttcgggattgcattttgcagacctctcagcctgcgatggttggagttccagacgatacgtcgaagtgaccaactaggcggaatcggtagtaagcgccgcctctttttatctcactaccacaacgagcgaattaacccatcgttgggtcaaatttacccaactttattcaaaaagtcaatatcatgccgttaatatgttgccatccgtggcaatcatgctgctaacgtgtgaccgcattcaaaatgttgtctgcgattgactcttctttgtggcattgcaccaccagagcgtcatacagcggcttaacagtgcgtgaccaggtgggttgggtaagatttgggattagcatcgtcacagcgcgatatgcggcgcttgctggcatccttgaatagccgacacctttgcatcttccgcattctttctcaacaactctcccccactgctctgtttttgctatatcaaccgcacggcctgtaccgtgacaatctctgcatcttgcgccaggcgtcgcggcactacggcaataatccgcataagcgaatgttgcgagcacttgcagtacctttgccttagtatttccttcgagctttgccacaccacggtatttccccgataccttgtgtgcaaattgcatcagatagttgatagccttttgtttgtcgttctggctgagttcgtgcttaccacagaatgcagccattccgaatccggcttgtgattgcgccatccccatagcagccatcacatcagtaccggaaagagagtcagaagccgtggcccgtggtgagtcactcatcatcgggctttttggcgaatgaaatttagccacgctttcgagtctcatgcgccttctccctgtacctgaatcaatgtgagatttccgcagaacactgccccagtatcgatatacatctggttggcaaatttgagtggtttcactgctggcgtatgaccaaagatgaacgtgtccgcgcctttgatttctttcacgatcccgtcttgtgagttgctgattcgttcgcggttccagattacctgctgatgatcaactggctttccaaactcgtattcgtcacaaggataatcggcgtggcagatgacatattttttatctttgctcaccagttcgatgattaacggaagttcatctgctttatgggcaagagctttagccagaatttctttgtcgtaatcgagattaaagaaccagccaccgccattaagcatccagtgattgacgtttcctcgctctgataagccatcaatcatcatttgctcatggtttccacgtacagctctgaaccaggggaatgtgattaattccaggcattcgacgttctctgtaccgcgatcgaccaaatcgccaaccgagataagcaggtcttttttggtgtcgaatcctatcgtctccagttttttcatcaggttcgtgtagcatccgtgcagatcgccaactacccaaatatttcggtatttgctgccatcaattctttcgtaatagcgcatctctttcactccatccgcgatgaaccataagaacgtcgttgacgatggcgtgcattttcccgtctttatcatcaacgtattttctgaccgtacagcgactacatttcagtctgcgtgctacttctgtctggtttccgtatgcttcaacgagcatgtctggaatggtttttactgagaacgtcatgcggcctcacttctgctatttcgcaggtctttgagtttctgttggtactctgccttgatcgccttgcactcttcgacagtccagcgatggcggttatggtttgattcgatttcgtctactgcttcctgcccgatacggctaatcagttcgacgcgatacggaacgagatttccgcttttgtgctggttgcacaccacgcattgcttgtgaatattgcgttcatcaaatcggagttgaggtgccgcagcagttgtccggtaatgtccggcatcccactgagcagacgtgatcgttccgcatgagatacatggtaagtcgcggtctctttctctgatgaaggcgtttacggcttgttggacttgtttaatccagtaactgcggggctttaaggcgagttttcgaatcttaagtttatctttctgtttctgctcctctcgtcgtcgtttcttctctgctgctttttccgctttttcgcgttctttgcttcgtcgttcgagtgctatctttgttccacactctggagagcaccaccactgattagcgaatgcagggtgaaaccattcccgacattcttcgtttttacatcgtcttcgcgctggtttagccatcatcttcttcctcgtacattgagctattcggatcactcataagttctgcgcaacagtgctcacacacgtgaacttccagtacatgcagcttctgaccgcagttagcacacgttaaagctcgctcgacgctttctttctggtattgaagggattgggatgggctaagcattattggattctctgcatcatgagaaagacaatcatggcggcgcggaggggattttcatgtatagctcgcttagatttacagtaggccacaccgcgtgcaccccactcgtcttcatcgagattgataatgctaatcctgtatttttcaataatcggccatgcgtctgctgggtttacgcatgggttaaatgatccgcgctcaacttctacttcaactgcgtctccgtttacaatgtctccctcaaatgagacaaacaccatatcgccattctcaccttctttgtaatccggtgatccgttatgaatggcttcgaataccgccacgttaatttcaaaatcacttaactgtgaataatccattgtcatttcctcgcacgatgtcttagccaccggatatcccacaggtgagccgtgtagttgaaggtttttacgtcagattcttttgggattggcttgcgtttatttctggagcgtttcgttggaaggtatttgcagttttcgcagatgatgtcggtgaaacttcgtcgctgtcgcctcatgccgccctcctgacgccctgcccgatcgccatcaatgccgctttggatacggtagtaaacatccgtcgaggactgataaacggtcgccaaatcagcagcatggagcctttgctgtttcccttcttctccagccccgtcgatggttcgataaaattaatccgtccatcagtgataatgcgaacttcgtcgacactctccagagccttgctgaaccatccgactgacatatcctctggcacaagcatcactaccgtctgtcgctgttgtatgcactgctcagcggctttttccacccacggcctgatattgctgtacggtgggttattccagattgcaccgtggcttatccactcagaatttagcgcgtcgtcagcctcagttagccagtgagcgcacagagcgtttttgtcgctcgcagctgaatccagccagaatccaaactcaatatccagtgcatcaaaaagccaaagcggcgtttgccagcagtccttgtcgtgtgctggcgtatttgatttgatagtcatgcagcccgatctccccatcgcgctttccattcgagagctagtcgcgcttcgtctgaccacttaacgccacgctctgtaccgaatgcctgtataagctctaatagctccgcaaattcgcttacacgcatcctgctggttgactggcctattaccacaaagccattcccggcaaggttaggaacaacgtcctgctgctttaatgctgctgtaaaaacgcacttccagctttctgcatccagccagcgaccatgccattcaacctgacgagagacgtcacctaagcaggcccatagcttcctgttttggtctaagctgcggttgcgttcctgaatggttactacgattggtttggttgggtctggaaggatttgctgtactgcgtgaatagcgttttgctgatgtgctggagatcgaatttcaaaggttagttttttcatgacttccctctcccccaaataaaaaggcctgcgattaccagcaggcctgttattagctcagtgatgtagatggtcatacgtcagccccttgtgcatatcgtctgccacgcgcagcaggtgcatttgatgctgtgcaaatctgtctggcttcatcctggtcacatgccacaaagtgtccgttgcagaaccgctggtaaaccgtaccaagcgagccaaaacggtttttcgtcacgatgatttcagcaaatggtgcggcgctactgttctcgtcatataccgcttcccgatagagcatgatgattgagtctgcgtcctgctcaatgcttcctgaatcacgcaaatctgcgtttgtcgggcgtttgtttggtcgcttctcaacatcgcgcgaaagctgactcagggagataaccggtgttttcaggtctttcgccatcgccttcaggcttccggagatgtgagcaattgcgaggtcgttgcggtctgctttcggcttctcaatcaggccaagataatccgccatgatgagtgacaggtttggattttcctgtttgtgccgttctgcgattgagcgtatttcctcgaccgataaccgcgatgcatcgactacccatacatccaaatccgcaagctgattcatgccgttagcaacgcgtgcccagccctcgtcatccattgatgcaggatttcgcagtacgctaaccgacatcctcccggcgttggcaatgcttcgctctgcaatctgcaatgcgctcatttccattgagaaaatcaatactccgcgccggacgtcagaaccaggaataacgcggcttgcaacgccttcggcaatcttcagcgccagttcggttttccccataccaggacgagcagcgattatcaccaggtcttccgcgttcatccctccggtgatggcatcaagttcttcgattccggtcttcagggtatctgactcttctccgttcctcagacgcctgtcaagcgtgtcagtgtagtcagtaatgatttcccctaaccgtacaggttttacctcgtcacggggctttctgatggctgagagacgctttacaagctcatccatcgcctgactcgatgcgtcgatggttccgctctgaattggttcacgcatttcatccatgatttccagcaccagacggcggtgatagttatccgcgaccattccggcatatcccttcaggtttgcggcactcgggcagtttttgctggtcatcaggattgacgtgaaatgctcctctccgcacgcctcggcaaccatcagcgcgtcgattaggtttctgtttctcgcctgcttgcggataacctcgaaggctttccggtagagcggaattgaaaacgcttccggctccagcgttgccagaacgtcactggcagttggtgttaatccaccaatcagcaggccaccgataacgctcgcttcgatatcctgtctcatgctatccccctgtctgcaaacttcccttcccgtactcccgttaacgaatcttccctcagcaggtaatcaaaatctgccgtccagccagtgtcgttgtctccgaagtaaaacggcttggcctgatgtacaaacgccctgacatacgctctgaaaccgtccacgtttggcgttttcagttgcgggatgattttcttcaggcggcgtttgcgtttctcgttgaccgcaacagcgtgtggcagtctgtcaccgacttcggtgttgtaggcgttcaggaaggattcgtagtcgattcgttctgccttgcgacgttcatgtttaacctgcccatcgcctcccccattggggggtaggggggtattatttatattcttgttaataccttcttgttcatgatgtgcggttgtttgtgcggcttcatgtgcgctttcatgtgcggcatgtacgctgaaagccgcgccattactggcttcatcatgtgcggcatcatgtgcggttgtttgtgcggcttcatgtgcgggtgaattgtccattttttgagcatattcatggtaatttgtgatggtgatcacacgacctttttgcttctctccatcaatggtgatcatcccctctttcacaaaaacctgaagcatccgctcaacctgatcacggcttgccggcttgccatgcctgtcgcataactgaagacctaaatcagctgctgtcacaaccagttgaccgggttgcagatgccattcatgacctttgaaattcgctttgtatggctttctggcggcattcaggagaaggttttcccacagggtgcgaagataaacatctttcgcccatgactgtttcagaatgctccggtacaacggaatgtaaccagttttctggttctccatcctgttgctcctgcgctcgtgtgcggcgctgaaatcgtagatttttgctgtattgctcataactacctgccttgacgaaagaccttaagaacatcgttaaactgacttacggatatgtcttctttgagcagcttttccagaaatgcgtttggaatgaacgtatatccctcctcttttggtagagacgggagcaacgccctcgcctcagccttcagaagctcagttctggcaactttcacaaaagagatttgagttctttcatcaatggaacgaaggaagcgcaaacgcttagcttctttgtgtgtatcaggtggattaaagcctttgtttcgcatataattacctcgttggatgttgttaaaattccatttgtatttgatcagaacgctcggtcttgcacaccgggcgttttttattggtgagtccatcaagcgcatacttaaaagccctgctaatcggactgatgtctgatgccattccgaaagcacacaagaccgaagcaataaatctccagtccgttctgcttatcttcgattcatgacaaccaatcatctttgccagaccgcgctgggtaagcgttgacaggttgatgagtaaatctgtttcagcgcgatcaacgtcgcgctgtgatagtttgctgtaacttgtttgttccatttcttactatttccataggtaaataatcactaatactcatctttcgatgagtgcttaattagttaccgcgttgtcggcggtgcagattgataaagagcggtgttacttatgcagttgtttttttgttgcttgggaagggctttatttcttccgcataaacgcttccatcagcgtttatagttaaaaaaatctttcggcctgcatgaatggccttgttgatcgcgctttgatatacgccgagatctttagccgtcttggtttgaccaaagcgcattgcataatctttcagggttatgcgttgttccatacaacctccttagtacatgcaatcattatcaccgctagaggtaaaatagtcaacacgcacggtgttagatatttatcccttgcggtgatagatttaacgtatgagcgcaaaaaagaaaccattaacacaagagcagcttgaggacgcacgtcgccttaaagctatttatgaaaaaaagaaaaatgaacttggcttatctcaggaatctgtcgcagacaagatggggatggggcagtcaggtgttggagctttatttaatggcgtcaatgcattaaatgcttataacgctgcattgcttgcaaaaattctcaacgttagcgttgaagaatttagcccttcaatcgccagagaaatctacgagatgtatgaagcggttagtatgcagccatcactcagaagtgagtatgagtaccctgttttttctcatgttcaggccgggatgttctcgcctgagcttagaacctttaccaaaggtgatgcggagagatgggtaagcacaaccaaaaaagccagtgattctgcattctggcttgaggttgaaggcaactcaatgacagctccggcaggatcgaaaccaagctttcctgatggaatgttaatcttggttgaccctgaacaacctgttgatcctggtgatttctgtatcgctagacttggtggtgatgaattcacattcaaaaaactgatcaaagatagtgggcaagtgtttttgcaaccacttaacccgcagtttccaatcatcccatgcaatgagaactgcaacattgtaggcaaggttatcgccagtcaatggcctgaagagacgtttgggtaattccaattgtgatttatgagcagtcaattccgccagattggtgatgatgacaagccgctatagcttagcttcaacatgaatacattcatcgtaaccacagcagggagtttaacgaatgaattctattgaaaatcatgatgtttatgtgtatacaggcgatattcatcgtgatggttatcttgatctcaccaatgaaatcaagaaacgtaagtcacaacatggattaaaagagaatgttatcttctgtgttgctacttatggcggtgatccaaatgcaggttatcgtataggtagagctctacaacaccattatgaaacggtaacacttttagttgttggaccatgcaaaagtgctggtacactaatagctatagcagccaataaacttgttattggtgacatgggggagcttgggccattagatatccaactgaaaaaaaacgatgaaataggtgagatgagttctggtttagctatcatgacagctcttgatgctctaaaggaacgctctatttcagcgtttaactcacaccttgttaagataagatacgaaaatcagataagtactaaaatgtctgctgatatcgcgaccagacttacagaagcgttgatagcacctatggccgcacagatagatccaataaagcttggtgaacatcagcgcgcaatgagtatagctatcacttatggccaacgattagcagacaaaccaagcagcctaaaagaaggggcgttaggcaaactaatagcctcatatccttcacatggatttgttatagacagaaaagaagccaaggaacttttcaagtgtgttgagcatcctaaaggtataacagaaatactctataatcttttctgtgacaaaattcataatggtgacattccaacatttggaaagccgagggttattgattgtacaacgtatctacaaaaagaggaaaaagctaatgccgaagaatctgcaaccggagatggaaattctcaacaagatgttggaaagccagatccaagaaggtcacgatctggcaaaaaaagcggaacaacacctgaacgagatcaagaaggaattggagccgtatcaattcaaccaccagatgaacagcaacctaatgcatgatctctttgctctgtaattaattcctcacaacccggcctcagcgccgggttttctttgcctctcgctcccctttcccaacaacacataaccatttgtatttattggaaaactaatagatacaacttgctaaacagtgcaattctgatccctcacctacctaacaattcacccctgcaaaaaataaatccatataaaaaacatacagataaccatctgcggtgataaattatctctggcggtgttgacacaaataccactagcggtgatactaaacacatcagcaggaagctggaagccaaacggaacagattggcaggctctttaacttcgatggggcgctgacaaagcgcaaacagataccaaacgagatgggtttggcggtgatgtgaattgcagcagcaacgacagcaaccagaagatcagcatctggcgcattaccaccaaagccatttcacatgaggaaaatatcatgacggtaatcgtgtacggaaaatcaacatttgcaggaaatgccaaaactcgccgtcatgagcggcgcagaaagctggctatcgagcgtgatgctatatgcaacatcatcgattcgatcttcggcacagacagtgaggaacctgttcaggaagccccgagaaagcgtttaagcatttctgaaaaagcaatatcactcggcatcattagcaaatcaaatacagatgcgaatagcggaagcgtttgtttgcctgaagttgcactgtatgctgctggttacagaaggcaaaaactaattacagcgaggtaaaaatgaagcctagcataacaatcaagccagcgagagataatagcaggaaccgccgcagagaggccaggaaggcagaaagagcagagaaggaaaacaagagccgggaggagagaaaggcagagattttggaaaaaggaggattggctgccgtgaggggtgaaaaagcagctgaattagcagtagctcacgaaaagacagagattgacaataattctggtggagatgcaatgtttaaagttgtcaatcacgcccatcaacgaaaccccaaaaagaaatggtaatcaacccgtccaagacgggttttttattgcaagcaaaccacttatttgaggtgagatatgacaaaatcatggagcgtaccttttcctgaatcagaaactgaacatgagggaatgcctgttttctggagattccaagcgacagttgaagaagatggaatcaaaatattcgcacttcaatatatagcttttcatcagacagagcattatgcatggttggttcctgcgcattggattgttaattttaaaccagcaccaaatcagtggttacaggaatggaaacaaaggagaaatagatatgcaattaagaaagtagcaaaaaatgcagaaagatcttttgcattcccaacgaagaaacttgctattgaaagtttattgcgccggaagaaataccatttaatgaggataaaacaagatttggctgttgtatcaactcttgttgatgggatgaaaaatattgatacatcaacaccagatattgaatataactttggacacaaccaagaaacagaaaattgggtattctactaggccgcatagtcggcctttatttttggcacaaacaacagaggtgaatatgaacgcagttgaatttacaaaatggatggcagagcaagatatcacaggagccgacgaaaaggctgtgtactacatggctctgctatggattcacaaagcaaaagaggctgcaaatgctcttggagataagtaatgaaagtaaaaataactgcttctaataccagttttgttagtgctggtgatattacagaagtaataacaaaccatgatggaacccaagttatgtggtctgatttttgtaaaagatatgagcgagttagttggtgtaaactcgtatggggcgtcgaatacgaagaattacctgaaatgcatgacgaataagcactgtgtattcattccaacgagtgaatacacggagcaatgtcgctcgtaaccaaacaggagccgacttgttctgattattggaaatcttctttgccctccggtgtgagggcaatttttttgacggaggatatatgagtgaagtaacagatttagttgttattgaaaaagcaaatgcaatgactgtatttcagtctgccgaccagattgaagaaatccttcaaaaggttgaacgtgaagttatgtcctttgtgcctgatatcacaacggcaaagggcagaaaggagatcgcttctctggcgtataaagttgcgcagacgaaaacatatctcgatggtcttggaaaagaccttgttgctgaactgaaggaaattccaaagctaattgatgccaaccgcaagacagtgcgcgatcgccttgatgagctgaaagccaaggcacgccagcctcttactgattatgaagaggaacaggcgcgaattaaagctgaagaagaagctaaggcagcagctgaagctctcgcaaagcaaattgagtctgaccatgaaatagcgattttgatggatcgcgaatttgaccgccaaagagaagaggcaagactcaaagcggagcaggaaaagcgagagcatgaagaacgcttaaaaagagaagctgaagagaaagccagagctgaagccgaagcaaaggcaaaagccgaaattgaagcagcagcaaggcgagaagcagaagctaaggccgcagcggaacgtgcagagcgtgaacgcattgaagccgagcaacgagcacagcgcgaaacaaaagaggcagcagaacgagctgaaagagaaaagcaggcggcaattgaagcagaacgccgaaaagcacaggaggaggctgaacgaatccggcgcgaggctgaagcaaaagagcaagccagaatagcagaagaaaaaagaatcaaggaagaagaagagcgtagagcaaaggataaagctcaccggaaagaagtaaataacaaaatacttgctgaccttatcaaggttggcgcatcagaagatgttgctaaaaatatcataacagccatcgtaaaaggcgaagtattcgcaacaaaaataacctactaataaaaccaacataaggaaccacccatgatttacgcaatcgcgggaggcgctcgcatgggtgccttccaattaaatgaatctttacttgaacgaatcacccgtaaattacgtgacggatggaaaagagttgaggtcttgttatgcgcaatgaaatagccattaatcaccagatgcttcgcgctgcacaaaataaagcagtaatagccagatttattggtgattccaaaatgtggcttgaagcaaataaagagatgaaatcagctatcaaccatccgtggtatcgcaggaaatgagttttacagacaactggtcagacgaagaattcattcgtcagatgaaagaattaatcggtaacgaaggagatattcatgtcacttgcaaccacagtgaaggagagcaagttacagagacgcatgtacacgcagcaggcgttaatgtatcgccagaagggagatcgtgaaggtgttcgcgtatttttaaatgcggcaaagactgaagtattaaatcagcgttatttccttgggccgtgtccattctgagaacaatcatatgagcaaagaattttacgcaagactggcagctattcaggagaatctgaacgcgccaaagaatcagtacaactcattcggtaaatataaatacagaagctgcgaagacattcttgaaggcgttaagccgttactgaatggcctgtttttatcaatcagcgatgaagttgtgttgattggtgatcggtattacgtgaaagccacggcaactattaccgatggtgaaaacagtcatacggcaaccgctcttgcacgagaggaagaaagcaagaaaggaatggattctgcacaagttacgggagctacaagctcttatgcacgcaagtattgcctcaatggtttgttcggcattgatgatgcgaaagatgcagataccgacgagcataaacatcagcagaacgcagcagcaaagcaatcaaagccatcacatacacctgaacaggttctaaaagcattcactgacgcagcattgcagaaaaacaccgtagaagagcttaaacaggcgttcgccaaagcgtggaagatgctcgaaggcacaccggagcagcacaaagcgcaggacgtttacaacatcagacgagacgaattagaaggagcggctgcttaatggcacattcgattactgtaagactaaacaaacccgcaagagagtttcaggccggggaaaatatcggattcaacatccgtgctggcgttcagtattacgatcgccagacaaaaaagaaagaatggacaaactacagcgccgttgtatttgccaagccgggagcgcaagcggattactaccgtagtgttcttgttgaaggtggcattgttgaaattaccggagaaaacatcagggttgatgtttatcaggggcaaaatggtcaatcaatcactcttgaattactgaatgcaaagattggatttgcaacttcaggaaacagccaacagcagcaaagtagcaatcatcaaaatcatcctgaatacgacgattcaattcccttctaaagtagcaacataaggattccattatgccagcgcctctgtatggtgcggacgacgcgcgccgctgttccggcaattccgtgtcggaggtgctggataaattcagaaaaaactacgatcggataatgtcgctaccgcaggaaacgaaagaggaaaaggaatttcgccattgtatatggcttgcagagaaagaagaacgcgagcgaatttaccagacatcaatccgaccattccgcaaagccacatatacccacttccctgaaattgacccgcgcctgcgtaattaccgctcacgctatggcgctatcagtaatgactgaggaatttacaatgagaggacttgcatacaatcccggcattcttccggcagaaatgattattcgccaacgcgtaaagccaatgccatcgagagaggaattgcttaagagaaattcttttccatcagtgaatcaaaacaaatatctgaatgcgatgttgcggagtgggaagaaatgaaacaaatgtcactaattgagatggatggattcctgaaaggtaaatgcatcccacgagatttaaaggttaacgaaacaaacgctgaatatcttgtccgtaagttcggtgaacttgaatcaaaactcaacgagcagcgtgagtattacgagggcgttatctcggatgggagtaagcgtattgctgaactggagaaaagcgaagagcaactcatcaacgagcgtgaccatgctgagtatgctttagctgatatgtattttgcagcaaccgggaacaggccggaatggagtaactgtttcagtttttcagatgcagtagatgccgtagttgacagaattgctgatttagaagctaaacagccatcgccagtagtaccggaagaaaaaccaatgccgaaccctcctagcatgtatgcggttgatgcggttgcagctattgcagaggtgagaggctggaacgcctgtcgtgccgccatgcttcatggtgccaaacctgtaagccagacttacaagttgaacaagctgtcgggcaactctccggaaactccggatggttgggttatggtgccgaaggaaccaactcaggccatgattaaagcgtggctatcagagattgctaactttcgcggtcatgctgctggttacagggctgctcttgaggcagcaccacaactggaggttaaccgtggctaacctacagcttgctgtcaaaggtgaatacttcgatgccatgattcgcggagagaaaacggaagagtatcgcctgtgtaatgactactggaataagcgaattatgttcagggattatgaccgactgattatcacaaagggatatccgaagcgcgacgattccagccgcagaattgatgttccgtatgacggatatgaaatcaagacaatcacacatccccacttcggcgataaaccggtaaaggtatacgcgataaaggtgaatatcggcaatgaataacaatcctcgcactcgcggggatttcttttatctgaactcgctacggcgagttttgttttatggagatgataaatgcacttccgagtcacaggcgaatggaatggagagccattcaacagagttatcgaagcagaggacatcaatgactgctataaccactggatgatattggcgcagatagcaaatgcagacataaccaatattcgaattgaagaactgaaagaacaccaagccgcctgattgcggttttttattacctgatttgcaggttcgattccctattcggagatagcactcatgcaacacgaactacagcctgattcactggttgatttgaaattcatcatggccgatactggctttggtaaaaccttcatctacgaccggattaagtccggcgacctgccaaaagccaaagttatccacggtcgagcaagatggttatatcgtgaccattgtgaattcaaaaataagctcttaagccgcgccaatgggtaaaatagcgggtaaaatatttctcacatctaaaaaacaccattctaatcaatcccctgccactccaagtagatgtctgcaggggacaccatccttgtgtttatccctaaaaccacataaaaaccgtaaattaaattcgaactagcaggccgaataaggcacaccaggaactcgtggttttattcattatgaagtggtttttacctgttctcttagccaggtaataaacgcttcaatttttggccactgcctgcccggtaatgtggtgatgtaataatgctgatggcatttcaccgtcatatcgccaaacggcgcgacgagctcaccactggcaagccttttttgtaccaggcgttttcttcccatcgccaccccaatatgattcatcgcggcaataacagctaaatcagaacgatcaaagccaattccagaagatgtcggcaaattaaccgcataatgttgcgcccaactatgccattcatccgtaccggagtcgttgctccatgcctgtctgtcatggagcaacgtacagtgacacaggttaattaccgtgttggttaaagcatgtctttgagcgtattccgggctacatactggcaggatttcttcatccatcagaaagtgatgagtgagttgcgctgacggcgcatcatcaaagtagatcgccaaatcgattccggcacgttgcagattgacgttgtcattaccagtgagcacggtgagcgaaatagacggataccggcgtgtaaagtcacctaatgcgggcaccaaccagcattgggcgatagagggccgggaatacagagttaacgttcccgataactcctgatttttgatatcaagaatttcctggttcagggtatccagcgacgattttagcgcccaataaacacgtttcccctcgtgcgttaattccactttgcgatgggaacgaacaaacaactgaatgcccaattcttcttccagctgattgatacggtgacttaccgcactggggctcagcgacaattcctctgccgccagggcgaaggactgatgcctggcagccacttcaaaagtatgcatttttgataattgccagccgttaagcagccgatttcttatttcacgaaggggttccataatcacctcatttttcgcttaagtgtaaaaaaatagcggcaaaatttcagctatgagatgagctaaagtgaaccatatctcaattcaccttcatttttagatgtaaatcactccattgatgcaatttacctcatgtgaaaggcaaattttatcgtttgtcagcctgcgttgtttttttgtccaatatcatcaggttaatcacaggggaaggtgagatatgcactctcaaatctgggttgtgagcacgctgcttatcagcatcgtgttaattgtactgaccatcgtgaagttcaaattccacccgtttctggcgctgttgctggccagcttcttcgtgggaacgatgatgggcatggggccactggatatggtaaatgctattgaaagtggaattggcggaacgctggggttcctcgcagcggttatcggccttggcacgatactgggaaaaatgatggaagtatccggggccgcagaaagaattggtctgacacttcaacgctgccgctggctttcagttgatgtcattatggtgctggttggcctgatttgtggcatcacgctgtttgttgaagtgggcgtcgtgctattgattcctctggctttttcaattgccaaaaaaaccaatacctcattattaaagcttgccattccgctatgtaccgcattgatggcagtgcactgcgtggttcctccacatccggctgctttatatgttgccaataagctgggcgcagatatcggttcggtgatcgtctacggtttgctggttgggctgatggcatcactgatcggtggcccacttttccttaaatttctgggtcaacgactgccctttaaacctgtacccacagagtttgcagatctcaaagttcgcgatgaaaaaacactaccgtcattaggcgcaacgttattcaccatactgctacccattgcgctgatgttggttaaaacgattgccgaattgaatatggcgcgtgagagtggtttgtatatcttggttgagtttattggcaaccctatcactgccatgtttatcgccgtgtttgtcgcctattatgtgttgggtatacgccagcatatgagcatggggacgatgctcacacatacggaaaatggcttcggttctattgctaatattttgctgattatcggggccggaggcgcattcaacgccattttaaaaagcagcagtctcgctgatacgctggcagttattctctccaatatgcatatgcacccgattcttctggcctggttagtggctcttattctgcatgcggcagtgggctccgctaccgtggcaatgatgggggcaacggcaattgttgcacccatgctgccgctgtatcccgacatcagcccggaaattattgcgattgctatcggttcaggtgcaattggctgcacgatcgttacggactcgcttttctggctagtgaagcaatattgcggcgctacgctcaatgaaacatttaaatactatacgacagcgacatttatcgcttcagtcgtcgctctggcgggcacattcctgctgtcatttatcatctaagcgcaaagagacgtactatggaaaacgctaaaatgaactcgctcatcgcccagtatccgttggtaaaggatctggttgctcttaaagaaaccacctggtttaatcctggcacgacctcattggctgaaggtttaccttatgttggcctgaccgaacaggatgttcaggacgcccatgcgcgcttatcccgttttgcaccctatctggcaaaagcatttcctgaaactgctgccactggggggattattgaatcagaactggttgccattccggctatgcaaaaacggctggaaaaggaatatcaacaaccgatcagcgggcaactgttactgaaaaaagatagccatttgcccatttccggctccataaaagcacgcggcgggatttatgaagtcctggcacacgcagaaaaactggctctggaagcggggttgctgacgcttgatgatgactacagcaaactgctttctccggagtttaaacagttctttagccaatacagcattgctgtgggctcaaccggaaatctggggttatcaatcggcattatgagcgcccgcattggctttaaggtgacagttcatatgtctgctgatgcccgggcatggaaaaaagcgaaactgcgcagccatggcgttacggtcgtggaatatgagcaagattatggtgttgccgtcgaggaaggacgtaaagcagcgcagtctgacccgaactgtttctttattgatgacgaaaattcccgcacgttgttccttgggtattccgtcgctggccagcgtcttaaagcgcaatttgcccagcaaggccgtatcgtcgatgctgataaccctctgtttgtctatctgccgtgtggtgttggcggtggtcctggtggcgtcgcattcgggcttaaactggcgtttggcgatcatgttcactgcttttttgccgaaccaacgcactccccttgtatgttgttaggcgtccatacaggattacacgatcagatttctgttcaggatattggtatcgacaaccttaccgcagcggatggccttgcagttggtcgcgcatcaggctttgtcgggcgggcaatggagcgtctgctggatggcttctatacccttagcgatcaaaccatgtatgacatgcttggctggctggctcaggaagaaggtattcgtcttgaaccttcagcactggcgggtatggccggacctcagcgcgtgtgtgcatcagtaagttaccaacagatgcacggtttcagcgcagaacaattgcgtaatgccactcatctggtgtgggcgacgggaggtggaatggtgccggaagaagagatgaatcaatatctggcaaaaggccgttaataacgtttcaacgcagcatcgcaatcctttccctgggtgagcgatgctgccgatggcgcagacttaagatccccggtcttacccgctataaccccctccttttatcatcacccaacgcctttcgctgtaaacggcggtttcgcaaaccaaaccaaaaccgtaagtaagataaaagcaatagccgccatacggaaaatctcatttgcagaaatagaaagtgactgctgggttatttcattattaatttcattaagaactcctgaaagcgaaccatagtatttatccataatttgtgacgatgaattaaacacggggttaaattgatcgatggttgctgtcaactgactatggtgtaacgattcgcgtcgtccccacagcgtcattgtcaacgacgtaccaactgatcctgacaaggtacgaaaaaaattactcatactcgaggcattggcaaatttattatctggcaagcctgaaaacgaaatcgttgttaagggtaaaaagaaacaggcaacggcgaatccctgaaaaaactgcggcataatgatacctgtaaaatcaatcgttggcataaatgtcacagaacgccagtaatagcaaaccgcatacatcaaaaaactgaatgtcaccaacacccgcatgtctattttgttgccataacgtcctatcaaaggtgaaattaatagtggcatgatgccgatgggcgcataagcaagtccggcccatatcgcattataccccatcgtttcctggagtaactgcggcataaggacgatcgctccagagtaaaataaatacgcgcatgtgatactcacaataccaatggtgaagttacgggacttaaacaaactgagatcaagaatcgggttctctgaggtcgactcccaaatgactaaagagatcagagaaataactgatactactgttaatattattatcgtactcgagttgaaccaatccagatcgcgccctttatcaagcataatttgcaagccaccaacaccgagcactaacagggtcagtcctggtagattcattttgaccggtgaagtctcagtttctcttcctttaagtaaggttaagcataatgtcaggacgacaatccccatagggacattgattaaaaatatccaaccccagctaaagttatcacaaatatagccgcccaatatcggcccacatatcggagcgataatcacggtcattgaccataatgccagagcaaatgtccttttttctggtgggtaattccttaataataaactctgtgacagtggaattaacggccccgccattaacccctgaacgactctaaaaaatatcagcacatcaagattggtcgataggctacacattaatgaagacagcgaaaaaaaggttactgaaagtaaaaataatcttaattcgcctattctttgtgccaacctgccagtaacagggatcgcaatggcatttgctacaccaaacgaggtgataacccaggtgccttcgtctgttgatgctcccagaaagccagatattgtcggtattgcgacgttagaaatagtggaatccaacatttgcataaatgtcgctaatgacaatgcaatagtgacgcaccataacgtcccaccggttaatggtgccggagttgatttagtgattgccattaaagttgtccattatgcgaaataatgttgctaatttctttttctatcggactggtatcgataactaaagccttactggtataagccggcatggaggtcacggttgaagccagctcaggcatctcggcaatgtcttcgttcttcgtatcaatagttgctgtcatcgataaaccaatacgcaagggatgttccatgagttcttttggatcaagagaaacttcaaccggtacacgctgaacgattttgatccagttccctgtcgcattttgtgcaggtaataaggagaacgcattgccggttcccatattgatccctgtcacccgaccatgaaacacaacattttcaccataaagatcgctgataatattgaccgattgaccaatccgtacatccgtgagttgtgtttctttaaagttggcattaacccacatttgacgtgccggtacgacagccattaacgattgtccggggctcactgtttcgccgacctgaacacttctctgggcaatatagccggtaaccggactcttaatatccgtacgtttaagcgccaaccaggcttctttagttgcatccgccgcttcaacgacttgtggctgacggtttaatggtgtgttcattactaaagctttattcgctttataagcctggatagcggcattcaatgccgctttgctacttattaacgtatctttggtatgctccagcgtttcttttgaaataaccccctgcttcgctaacggcactcgacggttataatcttctaaagattgttgatactgaatacgtgctgaagcgacttcggcactgtattgtttatcctgtaagtatagtttattcgtttgccgaacaatatttgccagattatttttagctttattgagtgcgatagtggcatcagttttatccagtgaaactaaaatgtcaccttgtcgaacgtagttcgtatctttatgattaacgacagtgacactacctgagacttgtgcagaaattggatctgcattccccgtgacataggcgtcatctgtactaatcatgtcttctaattccattgaccaataggcataggcacctgaaaacgcaataaataaaactaccgccaataaagaaaagtattttcttctgttagaattttttttatttgaattaatctgttccactattatctctcatttctcatagatgaaatttatgaattgaatgaaaagagcattcattcttcatatcaaacacagtgcatgtgttgcacattatcccaggaacgttggaggcctaatttaaatgaggtgcaaaaaaaacaacagaggactaaaccgtggcttttgcaatacaattcttacgcctgtaggattagtaagaagacttatagtgccaacttgaaactataaatcatcggtacaatccctgattttattgttgacatttcatttatgccgactatttatatggtatacttgtcgaattatcttaaaggaagctcagattttcttatttttattgagaaaatgagatgacgccttatgtctgtattactacagggagaagggagatgcttcattgcaaagggaataatctatgaacgcaataattattgatgaccatcctcttgctatcgcagcaattcgtaatttattgatcaaaaacgatattgaaatcttagcagagttgactgaaggcggaagtgccgttcagcgggtggaaacacttaagcctgatatcgtcatcattgatgtcgatatccccggagttaacggtatccaggtgttagaaacgctgaggaagcgccaatatagcggaattattattatcgtctccgctaaaaatgaccatttttacgggaaacattgtgctgatgctggcgctaatggtttcgtgagtaaaaaagaaggcatgaacaatatcattgcggctattgaagctgcaaaaaatggctactgctatttccccttctctctcaaccggtttgttggaagtttaacgtccgaccagcaaaaactcgactccttatcgaaacaagaaattagtgtcatgcggtatattcttgatggcaaggataataatgacattgctgaaaaaatgttcatcagcaacaaaactgtcagcacttataaaagtcgcctgatggaaaaattagaatgtaaatcactgatggatctttacacattcgcacaacgtaacaaaatcggctaaccacatgaagtttttaccctatatttttcttctctgttgtggtctttggtcgaccataagtttcgcagacgaagattacatcgaatatcgtggcatcagtagtaacaaccgtgtcacacttgatccactacgtctgagcaacaaggaattacgttggttagcgagcaaaaaaaatcttgtgattgcagtacataagtcccaaacggctacgttgttgcataccgattcgcagcaacgggttcgtggtattaatgctgattatttaaatcttttaaaaagagcgttaaatatcaaaataacactccgggaatacgcagatcatcaaaaagcaatggacgcgcttgcagaaggtgaagtcgatatagtgttatcacatttagttacttcgccgcctcttaataatgacattgctgcaaccaaaccattgataattacctttccggcgctggtaaccacccttcacgactcaatgcgaccgcttacctcaccaaaaccagtaaatattgctcgggtagcaaattaccccccagacgaggtaattcatcaatcatttccaaaagcaacaattatctcttttacaaatttatatcaggcattagcatccgtctcagctgggcacaatgattactttattggtagtaacatcattaccagcagtatgatttcccgctatttcactcactccttaaatgtagtgaaatattataactcgccgcgtcaatataattttttcttgaccagaaaagaatctgtcattcttaatgaagtactcaatagatttgttgatgctttaacaaatgaagttcgctatgaagtatcacaaaattggcttgatacaggaaacctggcctttctgaacaaaccattagaactcactgaacatgaaaaacagtggattaagcagcatcccaatttaaaggtgctggaaaatccttactcgcccccctattctatgacggatgaaaatggctcggttcggggcgttatgggggacattcttaatattattaccttgcaaacaggtttaaatttttctccgatcaccgtttcacacaatatccatgctggaacacagcttagccccggaggatgggatataatacctggcgctatttatagtgaagatcgagaaaataatgttttatttgctgaagccttcataacaacgccttacgtttttgtcatgcaaaaagcgcctgacagtgaacaaacattaaaaaaaggaatgaaagttgccattccatattattatgagctgcattcgcaattaaaagagatgtatccggaggttgaatggatacaggtcgataatgccagcgctgcatttcacaaggttaaggaaggtgaacttgatgctctggtcgcgacacagctaaattcgcgttacatgatcgatcattactatcctaatgaactttatcattttcttattcctggcgttccgaatgcatcgctttcgttcgcttttcctcgcggagaaccggaacttaaggatattattaataaagcactgaatgcaattcccccaagcgaagttctgcgcctgacggaaaaatggattaaaatgcccaatgtgaccattgacacatgggacctatatagcgagcaattttatattgttacgacattatccgttttattagttggcagtagccttttatggggattctacctgttacgctcagttcgtcgtcgtaaagtcattcagggtgatttagaaaaccaaatatcattccgaaaagcactctcggattccttaccgaatccaacttatgttgtaaactggcaaggtaatgtcattagtcataatagtgcttttgaacattatttcactgcggattactacaaaaatgcaatgttaccattagaaaacagtgactcaccctttaaagatgttttttctaatgcgcatgaagtcacagcagaaacgaaagaaaatcgaacaatatacacacaggtatttgaaattgataatggcatcgagaaaagatgcattaatcactggcatacattatgcaatcttcctgcaagtgacaatgcagtatatatttgtggttggcaagatattactgaaacgcgtgatctaattaatgcactcgaggtagaaaaaaataaagcgataaaggctaccgtagcaaaaagtcagtttctggcaacgatgagtcacgaaataagaacaccaataagctctattatgggcttcctggaacttctgtcgggttctggtcttagcaaggagcaacgggtggaggcgatttcacttgcctacgccaccggacaatcactcctcggcttaattggtgaaatccttgatgtcgacaaaattgaatcgggtaactatcaacttcaaccacaatgggtcgatatccctactttagtccagaacacttgtcactctttcggtgcgattgctgcaagcaaatcgatcgcattaagttgcagcagtacgtttcctgaacattacctggttaagatcgaccctcaggcgtttaagcaggtcttatcaaatttactgagtaatgctctcaaatttaccaccgagggggcagtaaaaattacgacctccctgggtcacattgatgacaaccacgctgttatcaaaatgacgattatggattctggaagtggattatcgcaggaagaacaacaacaactgtttaaacgctacagccaaacaagtgcaggtcgtcagcaaacaggttctggtttaggcttaatgatctgcaaagaattaattaaaaatatgcagggcgatttgtcattagaaagtcatccaggcataggaacaacatttacgatcacaatcccggtagaaattagccagcaagtggcgactgtcgaggcaaaagcagaacaacccatcacactacctgaaaagttgagcatattaatcgcggatgatcatccgaccaacaggctattactcaaacgccagctaaatctattaggatatgatgttgatgaagccactgatggtgtgcaagcgctacacaaagtcagtatgcaacattatgatctgcttattactgacgttaatatgccgaatatggatggttttgagttgactcgcaaactccgtgagcaaaattcttccttacccatctgggggcttacagccaacgcacaggctaacgaacgtgaaaaagggttaagttgcggcatgaacttatgtttgttcaaaccgttgaccctggatgtactgaaaacacatttaagtcagttacaccaagttgcgcatattgcacctcagtatcgccaccttgatatcgaagccctgaaaaataatacggcgaacgatctacaactgatgcaggagattctcatgactttccagcatgaaacgcataaagatctacccgctgcgtttcaagcactagaagctggcgataacagaactttccatcagtgtattcatcgcatccacggtgcggctaacatcctgaatttgcaaaagttgattaatattagccatcagttagaaataacacctgtttcagatgacagtaagcctgaaattcttcagttgctgaactctgtaaaagaacacattgcagagctggaccaggagattgctgttttctgtcagaaaaatgactaaatagcggctcccacaatgttcaaatgtgggagctatttaccagcacatcttacatttatgatgagaactcctggcgaatttgttccccatgctggtcgagcgttgccgctcccggcataacatgcgggtccgcgcagccgctgatttttatcggattacccggcatcattattcccccggcttcaatcaacatatttctcgcctgagtttgtggcaatttaatggcctcagccacacttaataacggcgcgacgggtacaccaacttcatgtattctggctaaccaaacttcagctgcctgcgtttttaacgtccgctcaatatattgtttaagaatagcctggttttgtacgcgtaaaatattgctgctaaatcggggatcattaaccagttccgtaagctccagtgcctggcataacgcagaaaaaagcttgtcattaccacaacaaatcgtaatcggcttatcctgagtattgaaaacatcaaaaggtgccatgtagggatggcgatttcccagacgttgtggtgacttccctgtcgcgatatatgccatcagaccatgctccagaaaactcagcgtggcatcaaacatcgctatatcgacatgcgcccctctctggctcttttcacggccataaagtgcactcactattccgctgaataaatagacaccgccgcatagatccgcaagagatgtaccaacgcgcactggcggagcatcaggatatcctgtttccatcattatcccgctcattgcctgaatgatggtatcgtaggcaggagcatcttttagcggaccggtatgtccgaaacctgacgatgaagcatatatgaggcgcgggttgatttcttgaagcgtttcccatgaaaaccccagtttttccattgtacctgggcgaaaattctcagctaatacatcagcttgtttgagcatatttataaatatacttttatcgtgatcattctttaaatcaagaaccacactctctttgccatgattaataaaactgtaatagagtgactgtccatccacatagggaccaaatgtgcgggtatcatcaccatgacccggcggctcaactttaattacccttgcgcccatattacaaagaagttgagttccgaaaggtccattaaggacatgtgtcatatcgataactaataagccttcaaacgggcctttgctttcattatttgtcatttgcttatgccttgaaaaaagccgaaggtgaaaagacacttcggcatttatgtaaaatcaataacatgattaattatgaaaccagtcgactgacataaatccacaagggagccgtgacgacaaagcccagtacgctcacagccaatgacgctgtaccagtacgggtgtagacattaaaccggctggcaataatgattccggagaatgccggcggtaatgcgcctgccagtaccatcatctgcagatgttcgctgttcaaatgacatgccataccaacgaaaagcagtgccagtggcatcagaatcagcttcaggaaggtgttataagcaatttcggcactgaactcgaatttatgtgcagccagagtcaaccccgcagcgaataccgctacccctgagttagccttcgcaatcagattaaaggttgggtcccatgctgccggaatttttaccccaaccaacaccaggatcgttgccagaacaggtgcccatactactggctcctttgccgcagaaattaatgcgctcagattactattcttcttaccatccgctcctgaagaaggattcagcaaatacagaccaataggaatagtaattgcgttaacaataatagaaataattgctaccactaaacctgttgatacggaatcaccataaataggatcgagaactgcaaaccccaggaatccaatggtaggtgagcctgcaattaatgcacatacagctgcttctgcatgggtacgtttaaaaaatttgtagcaaccgaaccaggagaaaaagaaacatccgacaataaccacaagtgatacaagggtcagacgagtgtccgcaaaaatcatttccctgtttgcccgagtaatagatacaaatagagccgcaggaagcgcgtagtttaataccagtttattaaatgcccgagcttgatcttctgaaaatgtttctcgtctgccgctaaaataacccaacagcatgattacgataataggcaataaatcgccaataaaaaatgttagcataatagtatttccgataagggtcccctcaccatcgcataatgagttggcaagaggagacgatgtcagtatttaattaccagcgacttgttttgggttaagtttggtaatatggccactttcagttcctgctgcagggtcgatgaccacattaataatggtcggtttgcgcgactgaataccggtggttaaagcatgacgaagttcatctgtcgtggtgacgttatagccaacgccacgaaacgcatccattaatttgtcataccttgcatggtgcaacagatccgttggtgatggtgcaccagcgccactgagatcaacaccgtctcctctgtagatgccgccattattaaaaataacgatcgtcaccggcaggttatatcgacaaatcgtttcaatttccatcccactgaaaccaaaagcactatcaccttcaatggcgacaaccggagaaccagaagtcacgctagcaccgatggcatagcccataccgatgcccatgacaccccaggtaccacaatccagacgacgacgtggtttatacatatcaataatatttcgtgcattatccagggtatttgcaccttcattaactaaataaatatcctggttctcgcgcaatacgtcgcgcacagcacttaatgcattaaagtaatttaatggttgagtatctgtacttaatttttcatgcattttttgtgcattttgctgcttgtggatatttaaaatatcgcgccataccagtggagtcgtaaatgtgttttgtttcagttctgccagcataccttgcatactggatgcaatatcaccaacgactggcacagcaatggggcggttgctgtcaatttcctgcggttcaatatccagttgaataaactgtgtatctgccgcccatccttttttaccgtgtgccaataaccaattcagtcgtgcaccaacaagcatgacaacgtcagcatttgccagggcaaacgaacgcgcagctgccgcagaaagtggatgcgtatcttcaaggatccctttcgccatagacattggcaggaatggaatctgagcactttcaataaattcacgaagctgttcatcagcttgtgaatacgccgcgcctttgccaaggataattaatggccgttcagcttttgctaaaagcgaaattgcgctagtgactgacttcgggcatggcaataatgctggcgacggattttcaactttaacaatcgtggttaacgcttcgtctttttccatcgtcgcggccaggacatttgctggcaaatcaagataaactccgccagggcgacccgatacagagacccggatagcgcgtgccaatgcaatgccaagatcctgcggctgattaacgcgaaatgctgctttggcatacggttttgccgcattcatttggtccagctcttcataatcaccttgctgtaggtcgacgatcgcgcggtcgctggagccgctaatcatgatcatcggaaaaccatttaccgttgcgttggccaatgcggtcaaaccattgaggaatcctggcgcagaaactgtcaggcagatccccggtttttgggtaagaaaaccgcttgccgcagcggcatagcctgccgactgctcatgacgaaaaccaatataacgaatgccttccgcctgggcatggcgtgccatatccgtcacaggaatacctacaacaccataaatagtgtcaatattattctgttttaatgcttcaacgatgatatgcataccatctgtcatttgaagttgatctgacatgattaataacctcgaaatttttataaattgggagccagaagcccccgttaatatcagatggcgtggttttgcttcattgcagcaatttcatcgtcgctataacccagctcctgcaatacagcagcggtatgttcacctaatagcggcgcagctttaatatccggcgtaaaggcagagaatttcattggacaaccaacggtcagatattttccacgcaacggttgttccacttcaacaacactgccactttggcgcaaagagggatcaagtgaaatttctttcatacttaaaaccggtgcacaaggaatatcaaactgagtcaaataggccaccgcttcatgtttatcaatagtgacagtgtatttttcgatttcagcaaaaatatcgaaaatatgtggctgtcgtgcatgggctgtactgtatgccggatcggtaatccattctggtttgccgatggctttacaggtgttttcccagttttgctcctgaatagtgaaataaatataggcgttaggatcggtttcccagcctttacatttcaggatccagccaggctgaccgccaccacctgcattaccaccgcggggaactgcatcaccaaatgtaccattcggatactgcgggtattcttccagataacccaatttatcgagacgctgctggtcacgtaatttcacgcggcaaaggttcaatacggcatcctgcattgacatggtgactcgttgcccacgccccgttttttcgcgatgcagcaaagcagcaagtaaaccgatcagcaaatgcattccggtgttgctgtcacccaacgctgcagcgcttaccagcggcggaccattccaaaaacccgtagtggatgccgcgccacccgctgcctgagcaacgttttcataggcttttacattcacataaggcgaacactcatcaaaccctttgatcgaaccaaaaatcagacgtggattgatttcttgaatatgctcccaggtgaagcccatgtgatcaatggcccctggatgaaagttctcgactaagatatcagcttcgcggatcagcttttccattacctctttgccttccgctgttttggtatttaactcaatagaacgtttgttactgttaagcatggtgaagtaaagcgcatcgatatcaggaatatctcgcagctggtgacgcgttacgtcaccaacgccgggacgttcaattttaataacgtcagcgccaaaccaggccagcatttgagtacaagatgggccagattgcacaccggtgaaatcgagaactttaattccttgaagtggagttgacatagcaatacctattagttaattaaatatgtgttaatttagcgtttatttaaggcgtaatatcttctataaataacccgcaaaatatcgtcgtagctgcactcgatatttttaaaatcctgtatcaagtgctgaaaatcatttcatcgccacttccaattcctttctgcatggtaagtagtgaggacgaaaagaagaatatgataaatattgattcgtggtaatcagagagagtcgcgacatttgtgatgttattcttacaactgtaagaagcgccggtgatttacaagcaagggtatgattacgctttttaaagcgtaccataaaacataacataataaatgatttgtgatgacacgggattattgcggtttactttgaggaatataaaatgcgagtttatagcaccgcgagcgccaaataattttatgaccacaacctgtcgtattgtggtcataaaaaattgtcggctggagggagttaaatcctttacctcaatatactgcctgtcagcattagttcacaaacagtgcttcgctatcgacgatgattccatcttccgcacctttaagcgccaggtttgcctcgtagtattgctttttatcaagcagtttctgcgcatcagcaagtgcattacgagtctgtttaagtggcatcagatattggttttccattacgccaacaccggccaggcgaagctcttccattgcgccctttttatcccctttcgccattttttcattggcaatttttatcgcggcttctttttcgggagttgctacataactctcagaaattccgacagatgcattaatgacaatatattggtcatcattgagattggtctttttacctggcttagcgaactttgcccattcggtactgtcatctgacagcaaagcggaagcttcattggtcagttcttttgccttttctggatcgccatgaaacagagccaggcgcgctacctgcacgtcacgcatcgcatataaaccttgttcagagatacgctctgctgccgctgccgttttctgggtttgctgaacttgctgagtttgctgttgtgccgctaccggagcattatcagcagcccatacagttgaagatgccagaattgctgtgaccatcgtggccataattaaacgtttcatacttacctcattctttaacagttttagaaaacgccgccatcatattgggtgagcatgaaatgagaaatcagagagcaacggtcattttgaaagggttatcttacagttgtagttattatcgcaagaagtattttagtcttacaattgtaggaatatgcttcctgtcgcagagaactattcttatataccacaaagagatgtcatttattatatcgatgtaaatactgattaattaaatgtaaatacagccataacatcgtaggttctcagtgaaccattttcaggataactttctatgaaagtaaacttaatacttttcagcttatttttattggtctctattatggcatgcaatgtttttgcattttccatttcgggtggtggaagtgagaggagctataaagagactgaaaaaacatcagcgatgacgaccacacactctacaaaacttcagccatcacaggcgattttgtttaagatgagagaagatgcgccaccattaaacctcacagaagaaatgccgcccccttttccgacaaaggcgaattatcttattcatcctgtgcgatagcgtctttcacatggcaggtgaacaatcatgtctgatgctgatgtgaacacctgcccaaatgagccatcctgacccactaccgcctgccataccccaccataaagcgaatcatcaagccacaagccggggcaagaaacataaatatccccgtcactagttcattaccgccagttaaccacatggtgaagtaataaatgagtgcagcgaggatcaccatgccgaagaaagaagagaccgccgataccacgttcagtacctgaccgatgtagccgcttacgcagacaatacacagggcgagaaacatccataaattaatcatagctcaacctcctgccgcgctaaaaaacctgtaacttcagtcactttaatagtaagacaatccttaacctctggcaatttttgctaagcatcaatgaaaacagcatgttaaatgcaagactgttgtgtacggaaaaatatttactttgcacgattaataatcagtagctgaaagcagtcagcgagtgataaagtacagataccgcattcatgctcctcgtggttatgtcctgactagtctttacactctttacaggaaccattgtcgtacatgatggcccaaccaattgagtgtaccgctgtcgacatggaatcttctgcgatacaacaattcgtatctacagaaggtaactatgtttccacaatgcaaattttcccgcgagtttctacatcctcgctactggctcacatggtttgggcttggtgtactctggctttgggtacagcttccttatcctgttctctgctttctcggcacgcgtattggcgcaatggcgcgaccattcctgaaacgtcgtgaatctatcgcccgtaaaaacctggaactttgtttcccgcagcattctgcggaagaacgcgagaagatgattgccgaaaactttcgttcactcggcatggcgctggtagaaaccggcatggcatggttctggcccgacagtcgcgtacgtaaatggtttgatgttgaagggttggataaccttaaacgcgcacaaatgcaaaatcgcggcgtaatggttgtcggcgtccattttatgtcgctggaactgggcggccgcgtgatgggactgtgccaaccaatgatggctacctatcgtccacataataatcagctgatggaatgggtgcagacccgtgggcgcatgcgctctaacaaagcgatgatcggcagaaataatctgcgcggcattgtcggtgcactgaagaaaggtgaagcggtatggtttgctcccgatcaggattatggtcgtaaaggcagctccttcgcgccgttctttgcggtggaaaatgtcgccacaaccaatggcacctatgttctctcccgtctctctggcgcagccatgttgaccgtaacgatggtaagaaaagcggattacagcggatatcgtttgttcatcaccccagagatggaaggctacccgacagatgaaaatcaagccgctgcctatatgaacaagattatcgagaaagagatcatgcgcgcaccggagcagtacctctggatccaccgtcgctttaaaacgcgcccggtgggagaatcgtcgttgtacatttaacaaactgctcttactctttccctcctcaaatcggccataataacctcatggtttttatggcttttttcttaaggttttttccttcgctgaatatctaattattaccgtcagaaattaaactgtcgccgatatgagacacttgtaagttactaaaagtaaataagaaaatgcctcttgtctcgtttcagttttaggcgtacattagcgccgtctcgagcagtttagctcagaattctggggtgatgcccacggtaaaatacagggcttttaaggtcgctttgcccggtgtcaactcactgtatcaggtgtaatgaagtcattcaggcgtaacagtaattacgcggagagatgtaaagtgaaatatttctttatgggcatttcttttatggtcatcgtttgggccggtacttttgccctgatgatctaaaagcaaactgtgcaatgaaaaacaggagccatcaggctcctgtttgcatttctgacgacggtgtttattccgcgttttcgtgaatatgtttgctgctggcgggtagtaaaccgtcggcacggaacatcgctttaatccctctgatggcctgacgaatacggtcgcggttttcaatcagtgcaaagcgaacatgcgtatcaccatagtcgccaaagccaatccccggcgagacacaaaccttcgcttcgttaaggagcttcttggcaaattccagcgatcccatggccgcatatggttccgggattttcgcccagacatacatcgaagccttcggcatttcaaccatccagcccgcttcatgcagccctttaaccaatacatcacggcggcgtttgtactgttcggcaatgtcgcgcacgcactgttgatcgccctccagcgccgcaatcgccgccacctgcaacggcgtaaaggtgccgtaatcgtgatagcttttaatacgagccagggcgctgaccagcgttttgttgccaaccataaagccgatacgccagcccgccatgttgtagcttttcgacagcgtaaagaactcgactgccacatcgcgtgcacccggtacctgcataattgacggcgctttccagccatcgtagacgatatcggcataggccaggtcatggaccaccagcacatcgtagcgtttcgccagcgccactactttttcgaagaactccagttccacgcattgcgcggttgggtttgacgggaagccgaggatcatcatcttcggtttcggataactttcacgaatggctcgctccagttcgttgaagaaatcgacaccttccaccagcggcactgagcgtacctgcgccccggcaatcaccgcgccataaatatggatcgggtaacttggattcggcaccagcaccgtgtcaccatgatccagcgtcgccagcatcagatgcgccaggccctctttcgaaccaatagtgacgatggcttctgattccgggtcgatttcaacgtcgtagcgatcctgataccatcgggaaatggcgcgacgtaaccgcggaatgccgcgtgaagtggagtaaccatgcgtgtccgggcgctgggccacagtacataatttttcgacgatatgcggcggagtcgcaccgtccgggttacccatgctgaaatcgataatatcttcgccgcgccgacgcgcagccattttcagttcagcggtgatgttaaaaacgtagggcgggagacgatcaatgcgcgtaaagcgacgttcagggcgagtgtcagccataatttcctcagattaacgttagcgcccggaccgtccgagcgacgctgccacaatggtggctgttttgaaaatagcctgattaatttctgtctgtccagcgttttagaacatttttatcaatggctttaaatgaggaactcaacttcaaaaacaggaaatttttctacgctaacaagaaaattaccaccaattttattaacattataatttcaataaatttaccatccagaagcgcattatcaagagatacattgctaatacaccatttatctttcaatccccttttaaatttatggtttttcctcaaaaacggcctgctggtcatcagccttcaggttacctatcatagaggtttaatccttattcagagtcacccgtgcacgaaatattcaacatgctgctggcggtcttcgatcgggcagcgttaatgcttatctgcctgttctttctcatccgtatccgcctgtttcgcgaactgttgcacaagtcggcgcactccccaaaagaattgctcgccgttaccgccattttctcgctgttcgccctgttcagcacctggtccggcgttcccgtagaaggctcgctggtgaacgtacgtattatcgcggtgatgtccggcgggattctgtttggcccgtgggtaggcatcattaccggcgtgattgcgggtattcaccggtatttaattgatatcggcggcgtgacggcgatcccctgctttatcaccagcattctggcgggttgtatatcgggctggatcaacctgaaaatccccaaagcacagcgctggcgcgtcggtattctcggcggcatgttgtgtgagacgttgaccatgattctggtaattgtctgggcaccaactaccgcgttggggatcgatatcgtctctaaaatcggcattccaatgatcctcggtagcgtctgtatcggctttattgtgcttctggtgcaaagcgttgagggcgaaaaagaggccagcgccgcgcggcaggccaagctggcgctggatatcgccaacaaaacgctaccgctgtttcgccatgtcaatagcgagtcattacgcaaggtctgcgaaattatccgcgatgacattcacgccgatgcggtggcgattactaataccgatcatgtgctggcctatgttggcgtgggtgaacataactatcagaatggcgatgacttcattagcccgactacccgtcaggcgatgaattacggaaaaatcatcattaaaaacaatgatgaagcccaccgcacaccagagattcattccatgctggtgatcccattgtgggagaaaggggtcgtgaccggaacgctgaaaatttactactgccacgcgcatcagatcacctcgtcattacaggaaatggcggtcggtctgtcgcaaatcatctccacgcaactggaggtttcacgcgccgagcagctacgtgaaatggcaaataaggcagagcttcgcgccctgcaaagcaaaattaatccccattttctgtttaacgctctgaacgctatttcatcgtcaatccgtctgaatccggataccgctcgccagttgatctttaatctgtcgcgttatctgcgctataacattgaattaaaagacgatgagcaaatcgatatcaaaaaagagctgtatcaaattaaagactatattgccattgagcaggcccgctttggtgacaagctgacggttatctatgatattgatgaagaggtgaattgctgcattcccagcctgctgatccagccgttggtggagaacgccattgtccacggtattcagccttgcaaaggtaaaggcgttgtcaccatcagcgttgcagagtgcggaaatcgggtacgcattgcggtgcgagataccgggcacggcatcgatccaaaggtgattgagcgggtcgaagcgaatgaaatgccgggcaataaaattggcctgctgaatgtccatcatcgcgtgaagttattgtatggcgaggggctgcatatccgccgcctggagccggggacggaaattgcgttttacattcctaaccaacgcaccccagtcgcctcacaggctacgttattgctttgagccggagtgatattgtgaaagtcatcattgttgaagacgaattcctggcacaacaggaactgagctggctaattaaagagcacagccagatggagattgtcggcacctttgacgacggtctggacgtgttgaagtttttgcagcataaccgcgtcgacgccatttttctggatatcaatattccgtcgctggatggcgtgttgctggcgcaaaacatcagccagttcgcccataaaccgtttattgtgttcatcaccgcgtggaaagaacatgcggtagaagcgtttgaactggaggcgtttgactacattctcaaaccgtatcaggagtcacgtattaccgggatgctgcaaaaactggaagcggcctggcaacaacagcagaccagcagtacgcctgccgcgacggtaacgcgtgagaatgacaccattaatctggtgaaagatgagcgaataatcgtcacgccaattaacgatatctattacgccgaagcgcacgagaaaatgacctttgtctatacgcggcgtgaatcctacgtaatgccgatgaacattaccgaattttgcagcaaactgccgccgtcgcattttttccgctgccatcgctcattttgtgtcaatctgaacaaaatacgcgaaatcgaaccgtggtttaataacacctacattctgcgactgaaagatctggattttgaagtgccggtcagccgcagcaaagtgaaagaatttcgccagttaatgcatctttaatcgggaactttcatgaaagcaccaggcttgcccgccgatcaacaatttttcgccgatctgttcagcggcctggtgcttaacccgcaactactggggcgcgtctggtttgccagccagcctgcctcgttaccggtgggcagtttatgtattgattttccccgtctggatatcgtgctgcgcggcgaatacggcaacctgctggaagcaaagcagcagcgaatggtggaaggagaaatgctgtttattccggcacgcgcggctaatttaccgatcaacaacaaacaggtgatgctgttaagcctggtgttcgcaccgacctggcttgggttatcgttttacgatagccgcaccacgtcgttgttgcatcctgctcgccagatccagcttcccagcctgcaacgcggtgaaggtgaagcgatgcttaccgccctcacccatcttagccgttcgccgctggagcagaatatcattcagccactggtgttaagtttgctgcatctttgccgtagcgtggtgaatatgccgccgggtaattcgcaaccgcgcggcgattttctctatcacagcatttgtaactgggttcaggataattatgcccagccgctcacccgcgagagcgtggcgcagttttttaatatcacgcccaatcatctgtcaaaactgtttgctcagcatggaacgatgcgttttatcgagtatgtgcgttgggtgcgaatggcgaaggcgaggatgattttgcagaaatatcatctgtcaattcatgaagtggcacagcgttgcggttttccggacagcgactatttttgtcgcgttttccggcgtcagtttggtctgacgccgggagagtacagcgcccgttttcagggctaacgtcagaaggttaattccgtttccagcagcgtcaggatgctttgcgcatcttgcgcggcaaacaatgactggcggaagtttttattcaccagtttacgcgccagctgcgagaagactttcacatggttcatcccttcgttagcacccaacgtcagcatgatcaccagttcgacttcgcccatctctgactgccagtcaaccggtttcaccagccgggcaatgctgatactggaatgacggatccactgagatttggtgtgcgggatcgccacgccaaaaccaacgccggtagtgacaatctcttcccgctgccagacatcttcttccagctcaaacggatgttcagtacgcccgttaacgccgaggttgccgcacaggaactggatcgcctgctctttattgctaaaatcctgatcaacaaagatattctccagcgccagcagtgggcgaacgtcttcttccggcgtaaaggcggtgagtaacgcttcaatttcctgcgcactgcggcattcacatgcctgacgcgccagttcccgacacgcctcgctatccagttgacgaagctggcttttcactgccggaatgcgcgggctactcatactcagctcatccaggcccagcccaagcagtagcggtagataacgactttcaccgcccagttcaccgcaaatacctacccatttgccgcgctgatgcgcagtggtaacaatctgctgcaacatgcgcaggaacgatggcgtaatcgggttatacagcggcgatacgcgcgggttattacgatcgaccgcatacagatactgggtcatatcgttagaaccgatactgaagaaatcgacctcatcgcagaagtggtcgatgatgtaacacaccgacggcacttccaccatgatacccagagtaatcgtctctgcatgacgcaggccatcgcgcttaagctcaacgatcgctttttggatctcgcccttcacccataagatctgatcgaggctgtgaaccatcgggatcatcaactgggcgttgccaaaactggcagcgcgcaaaatcgcccgtagttgagtgcggaacaggccagcaaattccgggtaaatacgtaccgcgcgatagccgaggaacgggttctcttcctggggaatattcagataaggaatgcttttatcgcctccgatgtccattgtgcggaagataatcggcttgtcgcccgctgccagtagcacctgctggtaggcttcaaattgctcctgctcgtccggcgcgctgtcacgatccatatacagcatttcggtacggaacagcccgacgccttccgcgccgttggcaaacgcgcctggtgcttccagagcggtgccaatattcgccgcgatatcaatacgcttgttatcacgggaataggccagctgcgcggcagcctgcgcctgttgtttttggcgtttatccgccagcgtctgcgcaacctgataataaccgctcaccgcgtcattcgggttaatcgccagcacgccgcactgggcgtcaagcaccgccggttgcccggcataacgggcaatcgcatccagcggcaggccgctcagtaccgggatcgccgaggcgcgggccagaatcagggtatgcgaggtgcgcccggttttctccagaatcatgcccgcaagatttttcaaatcaaggctcaaaaactggcttggggttaaatcttcagccaccagaatggtcggtttttccagcaccagattgttgcgcggcttcagttccggccaggtgatatgcagcaactgttcgctaatatcgcgaatgtcgctaacacgttcgcgcagataatcgctggcagaagcagaaagcttggcgcaaacctgctccatattgctgatgatcgccgcccccagtccctgatgctgttctgtcatcaggcgacggatattgcctgcaaattcatcatcctgaatcagcgacaaatgggcgctgaggatagttttgctttcgccgtcacgctcacgcaattgctggttcagttgctcggcaagcgttgccaggctgtgctccagccgggtggaatcttgcacactggcggggattgcccgataactgtcgaggctgtcgctttgtaacagggtcagcgtacccacgccgacgccgcttgccagcacattgccgtacagtaaatccgggttaaggcggcttaatgaacgcggcagcggatgcgccgtcagttctgcctgcgtaggctggacgctgtcgctgtcgataaagcgcacctggatgtactcttccagcacgcgccgcgcctgctcttcatcgctgccgctaatgttcaggctgcaactgtcattaaatagggtgccggtgccaatcagcgccagcgaacttttcgcatcggcctttgcgttctggcgatggttaataaaggtgacttcactttgccactggctgcactgttctttaagttcccacgccggacgagcatgtagaccgttaggcaaaggacagagaaattgaatcgttaacataaccgctccgggttaatcaggagatcatctgaaatccgtcagttgaacaaccgtctcacgcgtaagacgttgaataagggcagataaaagttgctgcatctgcaaaatgtcgcggcaatcggcaatcgatgcggcgcaatgtccatggcgggttgctggccccatcaccactgtgggcacgccggtgccggttaagtgcaccgccccgccgtccgtgccgccgttgctgaacatatctgcctgcaacggcacgccaatttctgccgccacggtttcgacccaggcggtaagttttggcggcgcaatcagcgacttgtcgcttaacaccagcatcggcccgttaccaatctggcgatggttagccgcgccataatcaaagtttttcgcccagcaggcggtatcaagcacaatggcgacgtccggcgacaccgcgcgggtggcagtttgcccgccgcgtaatcccacctcttcgctggaacttgccaccagccacacttccgcaggtagttcggcgtcgtgcagttcgcgcagtaacgtcaccagcagatagcaaccgaggcggtcatcaaaggctttccccatcactcgctggtgagggagaacctgaaaagtggtatcaaacgtgacgcgatcgccgggacgaattcccgcctgcatcacttcgtcataggagcgcgcaccaatgtccacgcgcatggcgctgacgtcattcccctgccggtcgccgtcaagcaggcctggaattttgcactcttcacgggtggtgatgcgcaccggctgcagctggcgggcagccatgcgtacgttgccaaccggcagcacatcaatcgccccttcgcgggagatgctgcgcaccataaatcccacttcgtccatatgcgcacagatcatcaccttcggacctgtcgattcattcaggcggatcagcaccgatcccagaccatcaaatcgcacttctttttgcaggcgatccgcttcttccagcaggatctgccgcacttcctgttccgaggaggcgatcgcatctgcctcgctcaacgcttttaatagcgataaatccattatgcctctcccgtgagcaacactgttttcggcatggcgtagagcacttctgcgccttgcggggtaaccagcacaacatcttcgatgcgcacgcccccttgccctggcaaataaatccccggctccacggtcagtaacatgcctggctgtagcgtcgtggtgtcccgcggtgaaaaacgcggatcttcatgaacttcaatgccgatagcgtgaccggtgttatgaccgaaatagtcgccataacctgcttctgtaatgacccggcgcgcggcatcgtcaacctgctggcagcgcacgccggggcgaatcgcggagattgctgcgagctgtgcctgcaggacaatttgatagacgttaaacagcgggtgagattcggcgctcaccccttcgccattcaccagcaaggtgcgcgtcatatcagagcagtagccctgatacagcgcaccgaaatcgagagtgacaaactcgcccgctgcaacaatcttgtcgctggctttgccgtgcggcagcgccccacgccagccactgacgacaatggtgtcaaaagaggctttttctgcgccctgctggcgcataaaccactccagttcagcggctatctcgcgctcgctcatccccgcctgaataaagcggcgaatatgctctgcaccgcgatcagcaatcccacaggcgaggcggattttctccacctcctctggcgttttgatttgccgcagcacatccggcgtggcgctaaccagtttcgcattgagttcagactgccagcggtgcgcggtttcccaactcacctgctggccctcaaaaccgagcgtttgcaactgttcatcggcaatgatttgattgacgatagtggtaagcgtgttcgtcgcgtcaagcaaatgcagctggtagccttgcgcacgggcttccacctcaacgtaatagcgcgaatccaccagaatgtgcgcactttcacggctaatcaccacataacctgatccggtggagatccccagatgcggctgtttgttctgccgtgaggagagaagcactgcatccagttgttgcgccttaagccagtcgcgcagcgaagcgagtaatgtcatctggattttccttcttacaggctatcgattaacaatttgcctttacggaacatcatcagacgcaggaacaccaccatcagcgcagttatgactgcccccagcgcgatccccgccatatagacgcccaggttagtgaccagcggccatgcccagatagcggactccgggaaccattgcactgcgcccagccagacagcggcggttgagccgacaatagcgccgaccatatacgacggaatggcggtgatggggctttccagcgcaaacggaatcgcaccctcactgatccccataaacgccaggaacatggcggtcttaccctgcggataaagttgagcgttgaacaggcgtttgccggttaaacgacggtcgataatggtcgccagccccagaccaatcggcggaataacgatagcgatagaacgagcggtgaccggtaatacgtggtcagtggtaaagctgaaggcaacaaaacctgcggctttgttgatcgggccaccaaggtcgattgctgtcgccgcggcgatccccattgcgtacatcagcgcgcccttctcacctgcggcagtcagcacagtacggataccgccgttgatccagccaccaaagggggtgatgacgtagtacatcgccagcatgacaaaaatggcggaaagaatcgggagcaaaaatgtggttttgaacgctaacaggaaatccggtaactggattttctggttcatccacttcacaaggtaacccgcgacgatagaaataatcagcgcaccaatgaaggtggacggcaccggcgaagaggtcgcccattgcatagtgctgggatcgaagttcagcagttgcgtcggctgggtagacatcaacccgccgataaaaccagccgggaacgccagtttgccaccgatagagttcgccacaaaagcagcaaacatcggaatggcaaaaccaaacaacacgccgccgaaggactgcgacagccaggcaaatttaagtaaggagaggtcgaaaccggagaatttcccgctattaagagcatccatgatgccgatctcagcaggaattttaagccagctataagcaatcagctggctgaaagcgaggatcacaccgcccataattaaggtcggcaccatgcgtgaaatccctgacatcacatgctgcgggagttcaccccagaagctggttttagaggcctgcggattcttaactgccgctgccgcaccggatgcgccaggcacaacggttgcactgcgttttttaatggccataacaattatccctgtcgaatattactgttgttcagaggcaatcatctcttcgatttctttgatgatgcccgcagcgtttttaattgcgtcctgcaaagtgatttcataaacgtcgcgtgattcgaaacgttcgttatcttccggggtaactgccacggagtggatgatgatggtcgcttcggcgatatcctgcgccgtcaggcgattctggataccgtccgcgccctgggtttcaattttcacttcataaccggcttctaccgccgcttcttccagcgcctgagcggccataaaggtgtgagccaggcccatcgggcaggcacataaggcaatcagtttcttactcatcgttaattcctcgttcagtgatagttgacgagtgaaattatgaacgtgcaaaacaaatcgccgttaccagacaaataatgcatttactggagaattaatcccgctgtacggaagtgtgacgcaggtcggccttgtgaggggacacaaagaaaaattgaataaactgtatgatttaaaagattatcgggagagttacctcccgatataaaaggaaggatttacagaatgtgacctaaggtctggcgtaaatgtgcaccggaaccgagaaggcccggattgtcatggacgatgagatacaccggaatatcatggacatattctttaaagcgccctttatcttcaaatgcggcacggaaaccggaggctttgaagaactcaaggaagcgcggcacgataccgcccgcaataaacacgccgccaaatgtcccgagattgagcgccagattgccgccaaaacggcccataatgacgcaaaacagcgacaatgcgcggcggcaatcggtgcagctgtcagccagcgcgcgttcggtaatatcttttggcttgagattttctggcaggcggttgtcagctttcacaattgcgcgatacaaattcaccagcccagggccagaaagcacgcgctccgccgaaacatgaccaatttccgcacgcaatatttcgaggataatggcctcttcttcactattcggcgcaaaatcaacgtgaccgccttcgcctggcaagcttacccaacgcttatcgacatggaccagatgcgcaaccccaagccccgttccggcaccgtaaaccgcaataggcttaccttcgaccggttctgcgccaccaaactgaatcagatgctcttttttcagcatcgggatcgccatcgatacagcggtaaaatcgttaataatttccagatggctaaaaccgagattctttttcatttcggcaattgagaacgcccaggtatggttggtcatcgccacccagtcaccggtaattgggcaagcgatggcaatacagccgtctttcacctcgaccttatgttcttcaagataaacgcgaatgaccgcttcgaggctggggtaatcaagccctgaataggtcttagcctgcgagatttcaccactggcaatatcacacagagcaagacgtgcgttggtgccgcccacatcaccgactaatgcatactttgtcattcttcaactgctccgctaaagtcaaaataattctttctcacactgtaaatacctgggggcataacaacaacgccggaaaggcaggctccctgtaaatatcgatctgggtcacacaattactttatcgtttcagcaccaattgcagcgatgcctttttgcaagctgggcaaactaagtatctgaccccgcataaggaatagaacatgctccatccgcgagccagaaccatgttgttattatcgctccccgccgtggcaattgggattgcgtccagtcttattctgattgtggtgatgaaaatcgcctcggtattacagaatttgctctggcaacgactgccgggaactctggggatagcccaggattcacccctctggatcatcggtgtattaacgctaacgggtattgcggtggggttggttatccgtttcagccagggtcatgccggaccagaccccgcctgtgaaccgctgatcggcgcaccggttccgccctctgcgctacctggacttatcgtagcattaattctcggtcttgctggcggcgtcagcctggggccggaacatccgatcatgaccgtcaatatcgcccttgcggttgccattggcgctcgtctgttaccgcgcgtcaaccgaatggagtggactattttagcctctgccggaaccatcggcgcgctgtttggtacacctgttgcggcggcgttgatattttcgcaaaccttaaatggcagtagtgaagttccgctatgggatcgtctttttgcgccgttaatggcggcagcagctggtgcacttactaccggattatttttccatcctcatttttcactgcccattgctcattacggacagatggaaatgaccgatattctcagcggcgcaattgtcgcggcgattgccatcgccgcagggatggttgccgtatggtgcttaccacggttgcacgcgatgatgcatcaaatgaaaaatccggtgctcgtgctgggtattggcggatttattctcggtattctgggggttattggtggaccagtttcgctgtttaaagggctggatgagatgcagcagatggtggcaaatcaggctttcagcaccagcgattactttttgctggcggtaattaaacttgccgccctggtcgttgctgccgccagtggctttcgcggtgggcgaattttcccggcagtgtttgtcggcgtggcattagggttgatgctgcatgagcacgttcccgccgtaccagcggcaataaccgtttcttgcgctattctcggcatcgtgctggtggtaacacgcgatggctggttaagtctttttatggcggcagtcgttgtacccaataccacattgctaccgctgctctgtatcgtcatgcttccggcatggctgttattagcaggtaagccgatgatgatggtcaatcgtccgaagcaacagcccccccacgataacgtttagcaaaaaatgctctcctttatgatttaagagttatggcgatgatacggggctttacctccccgtaatattgcgttaacaggccgctgacggcttcgatcgtgaaggagaataacaatgttcaggtcactgtttctggcggccgccctgatggcatttaccccgcttgcagcaaacgcaggtgaaatcaccctactgccatcaatcaaattacaaattggcgatcgcgatcattacggtaattactgggacggtggtcactggcgagatcgtgattactggcatcgcaattatgagtggcgcaaaaaccgctggtggcgtcatgataatggctatcatcgtggctgggataagcgtaaagcgtatgagcgtggctatcgtgaaggctggcgcgatcgtgacgatcatcgcggaaaaggccgcggacatggacaccgccattaaacacattcgccaatggagcacaatgcctgatgcgacgctagcgcgtcttatcaggcctacaaaccggctctttaacgcgtagggcgggtaaggcgtttacgccgcatccgccaatagtgccagatgcgacgctcattcaactacaatcccagtgccgtacccaccaacaaccagatattcagcgccactaccagcaccacaatcacccagcctgtctgttttacgcgtttgctgttcaccagatcgcccatcaacttgctgtcactggtgaaaatcagcagtggaaccagcgccagagcgataccaaaacttaacagtacctgactcataaccagaatccgtgtcggatctaatcccatcagaatgacaataaatgacggcaacatggtgactgtacgacgcacccacagcgggatatgaaagcgaatgaagccctgcatcaccacctgccccgccagtgtccccaccaccgttgaagacagccccgcagcaaccaggcttaatccaaagaccgttgccgcagcgtggcttaacagcggttgcagcgtcagataagcctcatcaagatcggcaacaccagtatgaccggaaaagtggaacgccgccgcagctgtagccatcatcgccagattgacaaaaccggcaatagtcatggcgatagccacatcccatttggtggcggaataacgttgttgacgcgaaccgccatgtaaatgctgagtgagcgaggagtgcaaataaatcacatgcggcataatcgtcgcccctaacacgcctgctgccaggaagaccgcttccgaagtaggtaaactcgggatcaccattcctttacccagctgcgccaggttaggctgggagaaaatcaactcgacaatgtaagccgcggcaacaaacaacagtaacccgccaatcactttctccagcggtttttgcccgcgacgttgcagcattaaaatcaggaaagtcgcgatccccgtcagcaccgcgccctgcaacaacgaaacaccaagaatgagtttaaaaccgatcgccgcaccaataaattccgccaggtcggttgccatcgcaataatttctgcctgaacccaatagaaccacactacgggacgcggatagtgatcgcgaatctgctccgccagatttttaccggtggcaatccctagtttggcagagaggatctgaatcagcatcgccatcaggttggcccaaacgacaacccacagtagctgatagccgaagctagcacccgcctgaatattggtcgcaaagttaccgggatcgatataaccaatcgccgcaatgaacgcaggtcccattaatgcgagcctcatcttgcgcgccgcccgtccgctgctactctcaacgcgatagttcgtcatcttgtgcctctaaaacatagcctttgctatgtttcatgctatgccaaacgagaatgattatcaaattcatttaaatggattgtggtgatttctctgatagaccaggattatgactacgaaaagattgatgacttgaatgttatggttatgtttaatgttagcacatttacataactttcagcttccatacacaacatagcagaaatgtatgacagatcactatttttgaagcctgtcacaggacgtcattatagtgtgtgtcagatctcgttttccttaaccatgttacatagaatgtgcacggaaatttaacctgcctcatatttggagcaaatatggaccgcgtccttcattttgtactggcacttgccgttgttgcgattctcgcactgctggtaagcagcgaccgcaaaaaaattcgtatccgttatgttattcaactgcttgttatcgaagtgttactggcgtggttcttcctgaactccgacgttggtttaggcttcgtgaaaggcttctccgaaatgttcgaaaaactgctcggatttgccaacgaagggactaacttcgtctttggtagcatgaatgatcaaggcctggcattcttcttcctgaaagtgctgtgcccaatcgtctttatctctgcactgatcggtattctccagcacattcgcgtgttgccggtgatcatccgcgcaattggtttcctgctctccaaagtcaacggcatgggcaaactggaatcctttaacgccgtcagctccctgattctgggtcagtctgaaaactttattgcctataaagatatcctcggcaaaatctcccgtaatcgtatgtacaccatggctgccacggcaatgtccaccgtgtcgatgtccatcgttggtgcatacatgaccatgctggaaccgaaatacgtcgttgctgcgctggtactgaacatgttcagcacctttatcgtgctgtcgctgatcaatccttaccgtgttgatgccagtgaagaaaacatccagatgtccaacctgcacgaaggtcagagcttcttcgaaatgctgggtgaatacattctggcaggtttcaaagttgccattatcgttgccgcgatgctgattggctttatcgccctgatcgccgcgctgaacgcactgtttgccaccgttactggctggtttggctacagcatctccttccagggcatcctgggctacatcttctatccgattgcatgggtgatgggtgttccttccagtgaagcactgcaagtgggcagtatcatggcgaccaaactggtttccaacgagttcgttgcgatgatggatctgcagaaaattgcttccacgctctctccgcgtgctgaaggcatcatctctgtgttcctggtttccttcgctaacttctcttcaatcgggattatcgcaggtgcagttaaaggcctgaatgaagagcaaggtaacgtggtttctcgcttcggtctgaagctggtttacggctctaccctggtgagtgtgctgtctgcgtcaatcgcagcactggtgctgtaagaccatacataaaaaagccggggataattcccataagcgctaacttaagggttgaaccatctgaagaatgcgacgcctcggtgcctcgttaagacgatgcctcgcgttcttcaattgcgttttgtaggctgtcagggatactgtcccacgaatggccacctgtaagctccagatgaccatttttgttattctccacaacgagttagttcttcttttcggatccggcacttctgggggggaaatccagcgatggctggattatgtcgtcaattaaaaatgcggcgagtagattagcaaatatccacgctttcgcgagttcaggttcctttgcacgcaaagcatccaggtgcagcaaacttttgagccgcttaaaagccagttcaatttgccatcgcagacggtaacaatcagccacttgctctgctgaatattcatcttccggtaatgatgttagcaatagcacatggcccgctgcttccagcgtttccgcctgaactactcgtccttttcgacgattctcgctgagcagtcgggttttactgattaatgctttttcgggaggaagtgatacggcaatgagacgtgccggaaagggagctccggcttttttattacctgaattgcctatcattacagtggtttcaccgttcttaccgcaatccagcccgcgcagaaaacccatcatgtcaaagcgcattccttctgcagttaaccagcgcaatcctcgccagtgaacccggacgatataatcagcttctccaaaagcaagtgagcggatacattcgggacgcgaaccgaatccccggtcagcaatgcgtatctcgtctgccgtttgcgcaaatcggtccagccgttcagcgtctctgctgtcggttagctcaaaatcagtgaactgacaggtatgaggatcatatcccatatgtagtcgccattcagcgctgccgcccccgggcgcactgattgctgttccatcgacaagacgcaatctctttccgcttgtacaacccgtaactgcggcgcgtacagcaagtgtttgtgcggcaagtatgccaaaccagtcggcggcattccgcagccgcttcaggagagccacgtcagataatgttgcaacgtcatggagctgagcccatgcagtgacttcacgtaatgacatccccccggggccgtaagccagccccagacgtagcagagttgcagcatcacgaatttcgcggcggcgggttagagccccggcattacgtgccgaagtatccagttcttcgggcttaccaatatgggccagaattgctgaccagttatcgtgagagtaattcatcggcacgttaaatcatatcaggcgtaataccacaacccttaagttagcgcttatgggataattccccggtttttttacgcctgttaatcagctaatggctgcgggcgaccaatcaaatacccttgcagatattgcaccccgagcttatgcaatagcgcctgctgctgttgcgtctcgacaaactccgcgaccacactcaatgacttcgctttcgccagatcggtaattgatctcacaatcatcgcatccagcgtgttcgtgacaatatctttcacaaagacgccatcaattttgatgatatcagcctgcaaacgctttaaccgttcgtagttggcatatccggtgccaaagtcatcaatcgcaatccggaaaccaaacttatgcagctgctcgatgttgtacatgctgctttctgcgttagaaaacgcctgctcctcggtgatctcaagaatgaccgcctgcggggagatgtgataacgcttaaacagacgaataatccgcccggcaatattcttttgcagcagcgtgagcggcattaaattgactgaaaagcgcggtccttttttgtcgcaagggtgtgttgccagccacttcaacaaggattccagcacttgcaaatcaaaacgcgcgctaaggttaaactgagcaataaggggcagaaacttatccggggtcataatgccgccgtcatatttcagtcgcgcgaggatctcatcataaccttcaccctctttgttgcgaattggctgggcgtagagcagcaaatcaccctgatctaacgccgtgcgaatggtattcagcaatagcacctgtttagtggtctgcccggaaaccatctcctctctgctatccagcgccagcacatgatgatgtgcgcaggattgctccgccagccagcttaactgccccaacaagggttgcagggtttcctgatttccatcaaaacgcccccaggcagcaccatagcccatatccagcccggtattgttccagtgaatttgccgactattcaggatgttaaccatatgctggagtcgcccttccgtttccggcccgctcagcactaacagcagttcactacccggcaattgatacaacttttcgttttcctgcatcaacggcagcagcgtacggcaaattgagcggatacagtgaacgcgcatcattaagccgtaatgacgactcacaaactcaagattatcaatgcgcaggcagcaaaaactcttgcccgcctcttgctccggcgcttgttccaacgcacgaaagttgggtaggagcgttaacggatctgtcagcgcctgcaaatgccagcggcgattaagccattcactgcgatgataaatgcgcaccatatagagcaggcaaacgctaaaggaaatcagcaccgcaagaataaatgccagcgaatattcggtttccaccccttgcaaaaagttctggttgtaattcagaaggcaaagcgttgaaacagcccaggtgagatttaaaaacggatagcgaagcttaccgaccccgagggtaaagatgatgaagaaaacgggtaccaggtaaccggcaataaagtcgttttcataaggtgtgcacaacagaagtagcagcacgcttaacgctgccagccagcttaaggtaaatgcgcgtttctctttgcccaacgacggagcgatatccctgcgccacaatatctgcgcaaagtggggacttacaatcatgcgagtgagatagtagaaaagcatgttgtaaatcagcacagcggtgaaaaggcttagcaaatcaacgaccgtgaaaatggcatccgcatcgccgaaaaaggtggatatctttagcgggaaatcaaagaagctccccacaagatacatgctgcatttgatgccgatcggcgtcaccaaaccaagccagaacagacgttgccagacatatcggctggtcaatccataacgccaacgcgtccccagctgccagcgtaatattgcgcaggcacacaacacgacaaacgtctggctaccgagcatgaccgcagtctgtaaaaaagagagatgaaagttccacagattggtgcaaaacatcccgcataaaacgggaacgacaccgcgccagccaaagataaacaagattgacagcattacgcacagtggcatccacgccagaaagatataactggaatggataatggcaagtggcgaaataaaacgggatagctgaataagtaccacggtgagcgtaaacgctagtgtgaatatcttgatattttttatcaggttatgctccacaaacatgagtacactactctcactgatcggggttttcaggcacacaaataataagtttattcgcatcccgaagcaaacagggggccagcctgttgccgatttttcatccaatgatgctttcaccaggcggcactaacccggacgtagactgtattacaaaagcggcaaaaagcagagacaaaaaacccccgctttgcagcgagggttggaaatttggtggagctaagcgggatcgaaccgctgacctcttgcatgccatgcaagcgctctcccagctgagctatagccccacgatgcgtttacgtaccaagtttgctgggtgcaaaatttggtggagctaagcgggatcgaaccgctgacctcttgcatgccatgcaagcgctctcccagctgagctatagccccgtcacgtaaagcttgtcgagttgacgggcggcatcatatgaattccgcccgaatgtgtcaacggcaaattgcaacgtgtagtttcaatcgctgaaaaatcaggcaaatgaacaattttggaaaaccgctcgcattcagtagttattcatgtcacggtttcctgtaaagtggtgttataaaatgaactactaatagacccacatacattcagggaattgttatgttcaaggagaggatgacaccagatgaacttgccagactgaccggctatagccgccagaccattaataaatgggtacgcaaggaaggctggacaacgtcaccaaaacctggcgtccagggtggcaaagcccgactggttcacgtcaatgaacaggttcgtgaatatattcgcaatgctgaacgtccagaaggtcagggagaagcgcctgccctttctggtgatgcgccgcttgaagtattgctggtgacactggcgaaagagatgacgccagttgaacaaaaacagtttacatccttgcttctgcgggaagggattatcggattgttacaacgcttagggattcgcgatagcaaataatatgaaaagattacgcaataaaatgaccaccgaagaactggctgaatgcctcggtgtggctaaacaaactgttaaccgttggatcagagaaaaaggctggaaaacggaaaaatttcccggcgtgaaaggcggtcgtgccagacttattctggtcgatacgcaagtttgcgagtttattcagaacacgccagccttccataacacaccaatgttgatggaagctgaagagagaattgctgaatacgctcctggagcacgcgccccggcgtatcgacaaatcatcaacgcgatagataatatgacagacattgagcaggaaaaagtcgcgcaatttttgtcacgtgaaggaattcgcaatttcctcgcccgtctcgatattgacgaatcagcataaataaaaaacggcaggatattatctcctgccgtttatctttttacacgctaattactgctgattttcgcgttcagcaataaaatccagcgctttgttgatacgctcgatactgcgggtcttaccaattgcgtgaacggtaacatccagtgctggagactgccccgcaccggttacggcgacacgcagcggcataccaactttacccatacccacttccagctcatccgccgtcgcctgaatagcgtgatgaacgttttcagcggtccagtcagtaatcgcggccagtttgtcacgaaccacttccagcggctgacgcgctaccggacgcagatgttttttcgcggcgtcggcatcgaactcagcaaaatcttcgtagaaataacggcagctctgtgccatctctttcagcgtcttgcagcgttcgcccagcagtttcaccagatcagccagctgcgggccgttacgggtatcgatattttcctgctcaatgtgccactgtaagtgagtagcaacatactccggcggcagcgcgttaatgtagtgatggttcagccacagcagcttgtcggtgttgaacgcactggcagatttgctgacggcattcaaagtgaagtatttgatcatctcttcacgagtgaagatttcctgatcgccgtgggaccagcccagacgcaccagatagttcagcagtgcttctggcaaataaccgtcatcacgatactgcattacgctgactgccccgtgacgtttggacagttttttaccgtcatcgccattgatcatagaaacgtgcgcgtaaaccggcaccggcgctttcagggccttaagaatgttgatctggcgtggcgtgttgttgatatggtcttcgccacggataacgtgggtgatttccatatcccagtcatcgacaaccacacagaagttataggttggggaaccatcggtacggcggataataagatcgtccagttcctggttgctgaactcgatcggaccacggatctgatcgtcaaaaacaacagaaccttcctgcgggttagcaaaacgtacaacacacggttcatcatcagcatgatgctcatggctgtggcggcagcgaccgtcataacgcggcttctcacctttcgccatttgctcttcgcgcagcgcttccaggcgctctttagagcaatagcatttataagcagtgccctcttccagcatctgatcgatcaccgcgttgtagcgatcaaaacgtttggtctggtagtacggaccttcatcccactccaggctcagccagttcatgccatccataatggcttcgatagcttccggcgtggaacgctcaagatcggtgtcttcaatacgcagcacgaactcaccgccgtggttacgtgcaaaaagccaggagtaaagagcagtacgcgcgccgccaacgtgcagatagcctgttgggcttggcgcgaagcgagttttgattttcatgaaatggccttacgtttagaaagatgccgacaaccggcaaatcctggaaaaattgagtgggcgatattctatcactcccgcctgattcctcaatgtagttcgggtttctaccttacgcattattgttttcgttgacaaattgcgcaacacggtctgttttgcgatcatcttgcttaaatttacgacgaacgaacaatttctttagaaaatgcgttgactcattttgaactctccctataatgcgactccacacagcgggggtgattagctcagctgggagagcacctcccttacaaggagggggtcggcggttcgatcccgtcatcacccaccaactactttatgtagtctccgccgtgtagcaagaaattgagaagtgggtgattagctcagctgggagagcacctcccttacaaggagggggtcggcggttcgatcccgtcatcacccaccactttctcgccagctaaatttcttgtaaaaatgtgaagtaccgaagtgggtgattagctcagctgggagagcacctcccttacaaggagggggtcggcggttcgatcccgtcatcacccaccacttcgggtcgttagctcagttggtagagcagttgacttttaatcaattggtcgcaggttcgaatcctgcacgacccaccaatgtaaaaaagcgccctaaaggcgcttttttgctatctgcgatactcaaagattcgaacctgcagcaggtttgagttgagcgcagcgaaacaacggagccgctcgcggcgacggcccgaagggcgagcgaagcgagtcatcctgcacgacccaccaatgtaaaaaagcgccctaaaggcgcttttttgctatctgcgatttgcgaaattgcctgatgcgcttcacttagcagactactatttccggcaattcctgtctcctcacctactgtgtcaatgcagccaacagcttaaccatcgcgggcgtcacctgctgtgtttcataaacaatatataaatctgcagggatgcgctgtttgagcggacggaaaatgacacctggccagttcatttgtgcgtagctgtccgctatcaatgtgataccaatgcccatactgaccatagcgagtaccgtttgcggttcattaacttcgcgaataacaaccggtgaaaatcccacctgctggcaaactcgctgcaaaaaatcccagtcagtgtaaacgggcggcattgtaacaaaatactcgtcacgtagcgcttccagcgggacggtggaaaatgatgagagatgatgctcttcaggcatcgccaccagaaacgccgattcatgcaaccgtaagctggtaaaaccagtcggtggttctgtcgccattcgccagatcccggcatcaagttcgcggcgttccagcaaggccatttgcatcgcgggcatcttttcgcgaaaaagaacgtcaacgttaggattttccctgaggaatcgccgcataaccgggcgcatccgtccccacattgccgttcccactacgccgagttcaatccgccctgcttctccccgacctatttgttcaatccgagccaatacattattagcattcaccagcaatcgacgcgattcttccatcaagattttgcccgcgtgtgtcagtacgacgctgcgcgaatggcgaataaaaagctgcgtgccgagttgattttccagctctttaatatgaatgctgagcggaggctgagacatatttaaacgcgctgctgcgcggccaaaatgcaactcttccgctacggcaagaaaataacggagcaacttaagatctgttctgtatacgcgttccataattaagtgctccatataataaatacatcgtattaaattatcatggcataaagtatttcaccaccagatatccgacatacataaacacaatggataatatacccggtaatacatttggtacaggaataggcaagcgcacgattgtaaacaaagcaccaataccaaaaccaacgccggaagaaaataaaatatctttcactaattaacctttatcataaaagcaactctgaagagcagagccgcgaatccttttaatgagtcaccgctcgatgctttatcttttcagggtcatgattatatttaaacccaaagaaaaatatcactgcgagaaaaagagcatatcctgcaaacaccagccagatagtttgccagtcttttacgccatccaccgaaaagtaatctactgccatgccactcagaatcgagccaacccatgcgccgacaccatttaccatggtcataaagagcccctgcgcgctggcacgaatgctggaatcaacttcctgttcgacaaataccgaaccagaaatattgaagaaatcgaatgcacagccataaacaatcatcgacagcagcagcaaaataaatccggttgttgacggatcgccataggcgaagaagccaaagcgcagcgtccaggccaccatactcatcagcatgacggttttaatgccaaatcgctttaaaaagaatgggatagtcagtataaagcccacttctgccatctgtgaaactgacagtaaaatggagggatatttcaccacaaaactgtcagcaaactccgggttacgggcgaaatcatgtaggaacggattaccaaaaacgttggtaatttgcagtaccgcacccagcatcatggcaaagaggaaaaagatggccatgcgtggatttttaaacagcacgaaggcatccagacccagcttgctggcaagcgatgtggtcgcttttttctccgcaaccggaatcttcggcaaagtcagcgcataagccgacagcagcaatgacgcaccggacgcgatatacagctgcagactactcaattccagatgcagcaggcttactgcccacatcgcgacaatgaaccccaccgtaccaaaaacgcgaatgggcgggaaagcggtcaccgggtcaagccctgcctgggcaagacaggaataagagacgctgttcgataacgcaatagtcggcataaacgccatcgcattgactaacatcacccaaaacatcatatccggatcagttacggatgccgcataaaaaagtacgcccgcacacaccaggtgacacagcatgtatgcacgttctgcgcgcagccatttgtctgcgatgatccccattataccaggcataataatcgcggcgatccctttggaactgtaaaccatgccaacattagcgccggtaaaatgaagggtattaatcatgtaagagccgagggtaaccagccagctcccccagataaaatattgcaaaaaggacattacctttaagcgcatcgcgatgctcataatcgtttccttgtcgcatcatttggcctcacccgcgaggccgtttcttattgtttttctcaggcaattttgcgcagaaagccacaaataaggttgatgaagttctgcttagagagctccgcagccgccagcgtttgcgcatgtgacaatttcacatcgcttaaaccttccgccatattggtaatcgcagagaccgcaacgactttaaggtcgcaatggcgagctgaaataacctcaggcaccacagacataccaacaacatccccaccaataatttgcatcatgcgaatttccgccgcagtctcgaaattcggccccggatacgagacgaacacgccctccgtcagagggaaaccctcttctttcgccactttttgtaacagtgcgcggtattccgcatcgtaggcatttgccagtgagaagaagcgctctccaaaacgatcatcgttaagacccaccatcggcgtaccgggcatggtgttgatatgatctttcaatgcgaccaggctgcctgcccccacttccggacgcagcgagcctgccgcattggtgcagaacagtagctcgcagcccagcagcttaaaggtacgaattgcgtcagtcataatggtcattccacgaccttcgtagaaatgtccgcgacctttcatacataccaccggtacgccctggagatggcccagcactaactcccccgcatgaccatgtaccgtacttaccgggaagcccggcagcttttcgtaggaaattgcgacagcgttctcaatctgatcggccagcgcgccgagcccggaacctaaaataaaggccactcgtggcgtgaaatcaggtttataagtcttgataatatctatgcaaaacagcgggttatgagaaaattgaacctgagacatacatatcctttttctgtagggtggaatctaacgcctttttatagcgaggttgtcccggctcttaccaatacacttttctcacgcattcaatagcgattcgatatcgatggatttatatcttttctctattaatccacggtaaaaactgtattggcgatattaattcctttgcattaacaatatgtcgtttttagcaaaccactttattaagcaatctactaataacgatcggcatagggaattatgctatgaaaaaacatcttttaactctgacactttcctctatattagcgatacctgttgtatctcatgcagaatttaaaggcggttttgcagatatcggcgtgcattatctggactggaccagccggactaccgaaaaatcgtcgaccaaatcacacaaagatgattttggttatcttgaatttgaaggtggcgctaactttagttggggagaaatgtacgggttcttcgactgggaaaacttctataacggtcgccataataaaccaggtagcgagcagcgttatacctttaaaaataccaaccgtatttacctgggtgacaccggatttaatctctacttgcatgcgtatggcacctacggttctgcgaatcgcgtgaatttccacgacgatatgttcctgtacggtatcggctacaatttcaccggcagcggttggtggttcaaaccgttctttgctaagcgttatacagatcaaacctattacactggcgacaacggctatgtcgccggctgggttgcaggttacaactttatgctgggcagcgagaaattcactcttaccaactggaacgagtacgagtttgaccgtgacgctacctatgcagcgggtaatggcggtaaagaagggctgaatggcgcagttgcactgtggtggaatgcaacatcacacattactacggggattcagtatcgatatgcggatgacaaactgggcgaagatttttaccaggatgcgataatctactccatcaaatttaacttctgattgattactgccggggctcccggcagtatgaattcactctatatctgatacaacggatccccttcccgcccagccattagcgcattgccctggtctcgtaccacgtcccataaagcttcagcggcggtggaaagtgaacggttcttcctgcgcaccagcatcaactggcgttcaacaaccggcgtaatgcgctttaccaccagtgggctaccttcaggcaatggtagcgccagtgcgggaagaatactgatgccgatgcctgcggctaccatcgggaacagcgtcgccggatgtccaatctcctgcacaatattcgcctgaataccattgcgcgccagcgctgcgtcaatcagcggtcggctgcctgacgcgtaatcctgcaacaccaatttcgctccctgtaatgcctgccagggtacataatcttccacggccaaagcgctatcgcgatggcaaagcagaaagaaaggctcggaaagaatcgcttcacattgcagatcgcccactgggcctggatcgatgacgatgccaaaatcgacatctccctggcgaatactttccattacccactgctgcggacgatcgtgcaggacaaactgaatatctggatagcggcgatggctttcagcaatgcattgcggaataagatgcgcggaaatggtctggctggcagcgacccgaacttttccgctcagttgttgccccatacgcccggtatcgcgcaacgtgctgttcagttcatccagcagtcgctcaagacgcaaagccagctgctgccctgcatctgtaagcaccacttcacgcgtggttctgtccagcaggcgaacaccagtatgattttccagttccttcacactgtgactcactgccgactggctcaggccgatacgctctcctgcacgactaaaacttttctcctgcgctactgtgacgaaaacctttaattgttttaaagaataattcatctgttttcttcatgaatggatgcaataaatcaattttatttctcaaactggaagaagcacaatagaaccatcgatcatctggagtctttatgaaactttttcgtatcctcgatcctttcaccttaaccctgatcacggtggtgttgctggcctctttctttccggccagaggcgatttcgtccccttctttgaaaatctgaccaccgcagctattgccctgctgttctttatgcacggcgcgaagttgtcgcgtgaggcgattattgctggcggtggtcactggcgactgcatttgtgggtaatgtgcagcaccttcgtgctgtttccgattctgggtgtactgtttgcctggtggaaaccggtaaatgtcgacccgatgctctactccggttttctctacttgtgcattctcccggctaccgtgcagtctgcaatcgccttcacgtcaatggcgggcggtaacgtcgcggcagcggtttgttctgcgtcggcatccagcctgctggggattttcctttcaccattgctggttggtctggtgatgaatgttcacggtgcagggggcatccttgagcaggtcggtaaaattatgctgcaactgctgctgccgtttgtgttggggcatctttcccggccgtggattggtgactgggtgtcgcgcaataaaaaatggattgcgaaaactgaccagacgtccattctgttggtggtttatacagcgttcagcgaagccgtcgttaatggtatctggcataaagttggctggggatcattgctgtttatcgtggtggtcagctgcgttcttctggctatcgtgattgtagttaacgtctttatggcacgccgactgagcttcaataaggcagatgaaattactatcgtcttttgtggttcgaaaaagagtctggcaaatggcatcccgatggcaaacattctgttccccacatcggtgatcggtatgatggtgctgcccctgatgattttccatcagatccaattgatggtctgtgcggtgctggcgcgtcgatacaaacgccagaccgaacagttacaggcgcagcaggaaagcagcgccgataaagcttaaagcggacgcttcaggggctggaccagttgcgtcagcccctcggttttaatcagcagcgtgatttgcattagctcaccgagcttccctgccgggaactcatctttgcgggcaaaccacagcagatactcctccggcaggtcgattaagcgacgccctttgtatttgccaaacggcattatcgtattggctatttcaatcagctgctctttttccatctcagctacccagcaaacgcagcatttccgcttcgtcgatgacttcaatgcccagttcctgcgccttcgccagtttagatcctgcagcttcacccgctatcaccagatcggttttcttcgacacgctgcccgcgactttcgcgcccagttcgaccagtcgagctttagcgtcatcacgcgacatctggcttaagctgcccgtaagcaccacggttttaccagcaaacgggctgtcaatctcttccgcgttgataacgatcggcgcaggccagtgaacaccttccgccaacagctcgctgatgacattgcggttgctttcttcggcaaagaagttgtgaacgtgggatgcaacgacaatgccaacatcaggcaccttttgcagctcttcaatcgaagcggcttccagcgcttccagcgtgccgaaatatgccgccagacctgctgcggtggcctcgccgacttcacggatgccaagtgcatagaggaagcgagcaaaggtggtttctttcgctttttccagcgcgttaaccacgttttgtgccgattttggccccatacgctccagtccggtcagtttgcctgcggtgagtttgaacagatctgccggagtatggacatattctttttcaaccagctgatcgatgattttgtcgcccattccgtcaacatccatcgcacggcgggaaacaaagtgtttcagcgactctttacgctgcgcaccgcaaatcaggccaccggtacagcgggcaaccgcttcaccttccacacgctcaacgtcagaaccacataccggacaatgcgtcgggaatacaacctcacgggtatcttccgggcgttcagaaagcacgacgttaaccacctgcgggatcacgtcgccagcgcggcgaatcaccactttatcgccaatgcgtaaaccaagacgttcgatttcatccgcattgtgtaaggttgcgttactcaccagcacgcctgcaacatggacaggttccagacgcgcaacaggcgtaatcgcgccagtacgcccaacctgaaactcgacgtcacgcacaaaggtcatctgctcctgcgccgggaatttaaacgctaccgcccagcgcggggcacgcgcgacaaagccaagctgctcctgctgtgccagtgagttgaccttaatcaccacgccgtcgatatcaaagcccagcgtcgggcggtcttcttccactttgtgatagaacgccagcacttcttccgccgattcacaaagcgttacccgatcgctgaccggcaacccccactgtttaaattgcagtaaacggccaagatgagtatccggcagctcgccaccttccagaacaccaacgccatagcagaaaaaagtgagcggtcgcttcgctgtaatacgcggatcaagctgacgcagtgaaccagctgccgcattacgtgggttagcaaaaactttcccgcccgtgcgtcgcgcatcttcgttaatcttttcgaaccccgcctgcggcaggaacacttcaccacgcacttccagacgcgccgggatattctctccgtgtagcttcagtggaatggcgcgaatggtacgcacgttagacgtgatatcttccccggtggtgccatcgccacgggtcgcggcactgactaaaacgccattttcatacagaatactgacagcaaggccatccagcttcagctcacagcaccaggtgactttctcgttgcttttcagacggtcctgcactcgtttgttgaaggcaagaaagctttcttcatcaaaaacgttatccagcgacagcattggcacttcatggcgaatctggctgaaagccgccagcggcgcagcacctacacgttgggtaggcgaatcaggcgtaatcagttctggatgtttggtttccagctcgcgcagttcgcgcatcagcctgtcgtattcagcgtcgggaatttccggcgcatccatcacatgataaagatattcatgatggcgaagcgtcgttcgcagttctgtcagttgttgttcgattgattccatatcgcaccatcaatgctaaaaacccccgacaagcgggggttcgaagaggagttaatttgccttaagtgtatcaggcgttggcgtctttgacttcgcggatgatgtcctggtactcgcgcaatttctgcggagtcatcatacggcgctgatcgtcaagcacgacaccgcccacttcatcggcaatatgctgcgcagattgcagcatcagcttgaagttctgcagctcgtcaccgtaagacggtacctgcataaagatagtgacacccggagtagtgaaatccttcatttcaggatcaaaggttcccggtttcaccatattcgccaggctgaataacgccgggccgctgccatccgggctaagatgacgatggtaaatattcatatcgccaaaaatgaagcccgcttgttgaatgctgttaagaagcagttcaccgtttagctcgctaccgtgatgcgccgcgacgttcatgataatcaccgcttctttgcgcttcggtttatccataactggagccggttccgctacaggctcaggctgtggtgccgctacgggttcttcaggctggaaagcctgttgtgccggttgcggtgctgaatgcacaggctgcggcgctggcgcgacctgtggcgaaactggctgctgcaacggctgttcaggctgcggctgataggcaggctgctgcaccggctgcgctggacgcggagcatgttgcggcggtacctgcgcttcaggcggctgctggaccggttgacgcggctgcgcagacgcataaggcggttggtactggtgttgcggcgacggacgagcagcctcatgctcctgagcgttagccggggcatgattcacgcggtgaacacgaacctcaccaacgccctcatcatcttcgacatcctcgtcataagaatcgtcgtcacgttttgacttcattcgttttaatggccgatcgcggaacatagaagatcgttctttacggctggtccagaaaccatgtaccagtaaagcgattatggcgatcgcgccaacaatgattaatatcagacgcaaatcctgcatcattatattctctgttgttctaacaccttgccaccacggcaaacatttactcactaagagtatttgccgattacctcaagtgcaagtgcactattaactttcacagcacaaagatagatgaaatcgtgctttttgctgttttttcgaacatatcctaactgtccattgcgcaattacccggtaaaatacgcagaattttcctgggattggtcaaaaggagctcatcctgattatggtttcatcattcacatctgccccacgcagcggtttttactattttgcgcaaggctggaagctcgtctcgcaacctgggattcggcgtttcgttattttaccgctgctggtcaatattttgttgatggggggcgcattctggtggctctttacgcaactcgatgtctggatcccgactctcatgagttatgttccggactggttacaatggctgagctatctgttgtggcccctggctgtcatctctgtgctgttagtgtttggctatttcttctcaacgattgctaactggattgccgctccgttcaacggtttattggctgaacaactggaagcacgattgactggcgctacaccgccagataccgggattttcggtatcatgaaagatgtgccgcgaatcatgaaacgcgaatggcaaaaatttgcctggtatctgccacgcgcaattgtattgctaattctttacttcatccctggtattgggcaaaccgtcgcgccggtactgtggttcctgtttagcgcctggatgttagccatccagtattgcgattaccccttcgataaccacaaagtgccgtttaaagagatgcgcaccgccctgcgcacacgcaaaatcaccaatatgcagtttggtgctttaaccagtctgtttacgatgatcccgctgcttaatctgttcattatgcccgttgccgtttgtggcgcgacggcgatgtgggtcgattgctatcgcgataaacacgcgatgtggcggtaacaatctaacggttattttgtaaaccgtttgtgtgaaacaggggtggcttatgccgccccttattccatcttgcatgtcattatttcccttctgcatatagatatgctaaatccttacttccgcatattctctgagcgggtatgctacctgttgtatcccaatttcatacagttaaggacaggccatgagtaagatttttgaagataactcgctgactatcggtcacacgccgctggttcgcctgaatcgcatcggtaacggacgcattctggcgaaggtggaatctcgtaaccccagcttcagcgttaagtgccgtatcggtgccaacatgatttgggatgccgaaaagcgcggcgtgctgaaaccaggcgttgaactggttgaaccgaccagcggtaataccgggattgcactggcctatgtagctgccgctcgcggttacaaactcaccctgaccatgccagaaaccatgagtattgaacgccgcaagctgctgaaagcgttaggtgcaaacctggtgctgacggaaggtgctaaaggcatgaaaggcgcaatccaaaaagcagaagaaattgtcgccagcaatccagagaaatacctgctgctgcaacaattcagcaatccggcaaaccctgaaattcacgaaaaaaccaccggtccggagatctgggaagataccgacggtcaggttgatgtatttattgctggcgttgggactggcggtacgctgactggcgtcagccgctacattaaaggcaccaaaggcaagaccgatcttatatctgtcgccgttgagccaaccgattctccagttatcgcccaggcgctggcaggtgaagagattaaacctggcccgcataaaattcagggtattggcgctggttttatcccggctaacctcgatctcaagctggtcgataaagtcattggcatcaccaatgaagaagccatttctaccgcccgtcgtctaatggaagaagaaggtattcttgcaggtatctcttctggagcagctgttgccgcggcgttgaaactacaagaagatgaaagctttaccaacaagaatattgtggttattctaccatcatcgggtgagcgttatttaagcaccgcattgtttgccgatctcttcactgagaaagaattgcaacagtaatgccagcttgttaaaaatgcgtaaaaaagcacctttttaggtgcttttttgtggcctgcttcaaactttcgcccctcctggcattgattcagcctgtcggaactggtatttaaccagactaattattttgatgcgcgaaattaatcgttacaggaaaagccaaagctgaatcgattttatgatttggttcaattcttcctttagcggcataatgtttaatgacgtacgaaacgtcagcggtcaacacccgccagcaatggactgtattgcgctcttcgtgcgtcgcgtctgttaaaaactggcgctaacaatacaggctaaagtcgaaccgccaggctagactttagttccacaacactaaacctataagttggggaaatacaatgttccagcaagaagttaccattaccgctccgaacggtctgcacacccgccctgctgcccagtttgtaaaagaagctaagggcttcacttctgaaattactgtgacttccaacggcaaaagcgccagcgcgaaaagcctgtttaaactgcagactctgggcctgactcaaggtaccgttgtgactatctccgcagaaggcgaagacgagcagaaagcggttgaacatctggttaaactgatggcggaactcgagtaatttcccgggttcttttaaaaatcagtcacaagtaaggtagggttatgatttcaggcattttagcatccccgggtatcgctttcggtaaagctctgcttctgaaagaagacgaaattgtcattgaccggaaaaaaatttctgccgaccaggttgatcaggaagttgaacgttttctgagcggtcgtgccaaggcatcagcccagctggaaacgatcaaaacgaaagctggtgaaacgttcggtgaagaaaaagaagccatctttgaagggcatattatgctgctcgaagatgaggagctggagcaggaaatcatagccctgattaaagataagcacatgacagctgacgcagctgctcatgaagttatcgaaggtcaggcttctgccctggaagagctggatgatgaatacctgaaagaacgtgcggctgacgtacgtgatatcggtaagcgcctgctgcgcaacatcctgggcctgaagattatcgacctgagcgccattcaggatgaagtcattctggttgccgctgacctgacgccgtccgaaaccgcacagctgaacctgaagaaggtgctgggtttcatcaccgacgcgggtggccgtacttcccacacctctatcatggcgcgttctctggaactacctgctatcgtgggtaccggtagcgtcacctctcaggtgaaaaatgacgactatctgattctggatgccgtaaataatcaggtttacgtcaatccaaccaacgaagttattgataaaatgcgcgctgttcaggagcaagtggcttctgaaaaagcagagcttgctaaactgaaagatctgccagctattacgctggacggtcaccaggtagaagtatgcgctaacattggtacggttcgtgacgttgaaggtgcagagcgtaacggcgctgaaggcgttggtctgtatcgtactgagttcctgttcatggaccgcgacgcactgcccactgaagaagaacagtttgctgcttacaaagcagtggctgaagcgtgtggctcgcaagcggttatcgttcgtaccatggacatcggcggcgacaaagagctgccatacatgaacttcccgaaagaagagaacccgttcctcggctggcgcgctatccgtatcgcgatggatcgtaaagagatcctgcgcgatcagctccgcgctatcctgcgtgcctcggctttcggtaaattgcgcattatgttcccgatgatcatctctgttgaagaagtgcgtgcactgcgcaaagagatcgaaatctacaaacaggaactgcgcgacgaaggtaaagcgtttgacgagtcaattgaaatcggcgtaatggtggaaacaccggctgccgcaacaattgcacgtcatttagccaaagaagttgatttctttagtatcggcaccaatgatttaacgcagtacactctggcagttgaccgtggtaatgatatgatttcacacctttaccagccaatgtcaccgtccgtgctgaacttgatcaagcaagttattgatgcttctcatgctgaaggcaaatggactggcatgtgtggtgagcttgctggcgatgaacgtgctacacttctgttgctggggatgggtctggacgaattctctatgagcgccatttctatcccgcgcattaagaagattatccgtaacacgaacttcgaagatgcgaaggtgttagcagagcaggctcttgctcaaccgacaacggacgagttaatgacgctggttaacaagttcattgaagaaaaaacaatctgctaatccacgagatgcggcccaatttactgcttaggagaagatcatgggtttgttcgataaactgaaatctctggtttccgacgacaagaaggataccggaactattgagatcattgctccgctctctggcgagatcgtcaatatcgaagacgtgccggatgtcgtttttgcggaaaaaatcgttggtgatggtattgctatcaaaccaacgggtaacaaaatggtcgcgccagtagacggcaccattggtaaaatctttgaaaccaaccacgcattctctatcgaatctgatagcggcgttgaactgttcgtccacttcggtatcgacaccgttgaactgaaaggcgaaggcttcaagcgtattgctgaagaaggtcagcgcgtgaaagttggcgatactgtcattgaatttgatctgccgctgctggaagagaaagccaagtctaccctgactccggttgttatctccaacatggacgaaatcaaagaactgatcaaactgtccggtagcgtaaccgtgggtgaaaccccggttatccgcatcaagaagtaattcttgccgcagtgaaaaatggcgcccatcggcgccatttttttatgcttccgccagcggcggcaaaatcaattcatcgctctcatgctgctgggtgtagcgcatcacttccagtacgcgcaaccccgctcggtgcactgcatcggttaacgccttccctttcagcaagccactgatgagctgagcacaaaacaggtcgccagtccctttcaggtcggtttttacccgtgaatgggaaatgacattcacgctgtcggcagtgaccaccacaacctgcatctcctgattttcttcattaccggaggcgctggtaaccaccacccattttaatgggtctgaaagcagactttttgcggcagcaatggcactgtcgagatcgcggcaatttttaccggtcaggatttccaactcaaagatattgggggtaattccctgcgccagcggcagtaaatattgtcgatacgcttcgggaaggtcaggtttgacataaattccgctatcaatatcgccaatcaccggatcgaccatgatcaataggtcaggatggtctttgcgtagcgcagtcagccactcggcaaggattttgatttgcgatgccgttcccatatagcccgtggttacagcacgaagttggcgcagcgcatcacgctcctgaagcgcacgcaaatagccgctaaaccattcgtccggaatcgcaccaccgtagaaagtgtcataatgcggcgtattgctcagcaataccgtcggcacggcaaagacattcaggccgttctgtttgatagcaggcacggcaatgctgttgcccacgctgccgtaaaccacctgcgactgcacggcgacgatatccgcctgcagtgccctactcttatcgttaaacaacaacaaactactcatttaattttttctccttgccgatgatcctcatcgtaatccaaccgaaactttacctgattctggcagtcaaatcggctatcacaaaacaaggataaggtaattcaatgaagaaaatcatttgtctggtcattacactactaatgacactccccgtttacgcgaagttaactgcccatgaagaagcccgcatcaacgccatgctggagggattagcacagaaaaaggatttgatatttgtgcgcaacggtgatgaacatacctgcgatgaagcggtttctcatctgcgtctgaagctcggcaatacccgtaaccgcattgacactgccgagcagtttattgataaggtagcctcgtcgtcatcgattaccgggaagccatatatcgtgaagatgcccggtaaaagcgatgagaacgcacaaccttttttacatgcgctaattgcgcagacggataaaacagtgcctgcgaaaggaaattaatccgctttggtaaggcatttacaggaggtaacatgaaaaaatgctttatttatcacgatgaaaaatcgaataaattttggtggatagattacgaaggggatagtttagctgtcaactatggcaaggtaggtagtattggtaaattccagacaaaagaattcgataatgaagaacagtgtctgaaagaagccagtaaattgattgccgcaaaaatgaaaaaaggatatcaagaagctccaaactttaacttcatggatcgctactattttgatgatgaagagattgggttacatcttaaaacgtcacacccaaacttccagtgccattttactgatccactttatatgtgttgctgggatgaagaatctccttttggtagcgatgaaggtgctgatgctctaaacgaacttgaaaatagcctccgtaaaaagccggatctggactgtgctgatttccctcaaatgttaattgaaactatgtggggtatgaaatacatcgctatggacagtattcttgaagaggatgtgcgtgcgcaattactagccgatgaaataagctctatccagagcaatatgattacctacgcgactgcattcggtcagatcaaagtcatgggtaaaatctcccataaacttaaaaagatgggactcaatgcactagcgcgtcatcagcttaccgcaaaaattcttcaatggggtgacggtcaggactcaccaatacttcaaaaaatgattgatgaccttactgcttttccacacgaaaattaaaaactgcatttgtcggcagcaacaactgccgacaaatcagattattgacaaagtgcactttgtttatgccggatgcggcgtaaacgccttatccggcataaaaaatattgctaattcaatatattgcagaaaccttgtaggcctgataagcggagcgcatcaggcagttttgcgtttgtcatcagtctccaatgctattaatccttaaatccccgccccctgactaaaatgctcttccccaaacaccccggtggaaaggtagcgatcgccacgatcgcagatgatcgctaccaccaccgcaccagggttagcttttgccacccgcagtgctccagcaaccgcgccgccggagctgacgccacagaatattccttcccgcactgccagttcgcgcatggtgttttctgcatcgcgctgatgaatatccagcacctcatccaccagagaagcgttgaaaatccccggcagatattccgcaggccagcggcgaatgccgggaatgctgctgccctcttccggttgcaggccaacaatggtcaccggtttggattgttcgcgcataaagcgtgacacgccggtgatagtgccggttgttcccatgctggagacaaaatgggtaatgcgcccgccagtttgctgccagatttccggcccggtagtggtgtaatgggcgtaagggttatcgggattattgaactgatcgagcagctttccttcaccacgattcgccatctccagcgccagatcgcgcgcaccttccatgccctgctctttggtgacaagaatcagttccgcaccataagcacgcatcgccgcacggcgttcctggctcatgttgtcgggcatcagcaatttcatgcgatagcctttaagcgcggcaatcattgccagcgcaatgccggtgttaccactggtggcttcgattaacacatcacccggtttaatttccccgcgcttttccgcctcgacgatcatcgaaagtgccgcacgatctttcaccgaacctgccgggttattgccttccagttttaaccacacttcactgccgttattcggccccattcgctgcaacttcaccagaggcgtattgcctattgtttgttctaatgtactcacgatctctatccatacgtggtgttgcctgatgcgacgcttgcgcgtcttatcaggcctacaggttacaaaccttgccattaaaaagcccggatcgcgggaagcgcctccgggcgtttaacattcactcaacctatcaggcgctttgtgcgagagcaagttcctcatctcgggtttcgatacgctcgtcgccgttatacagccgcgcatgttgcagaccaacgaataaacgctcgccacgctgcggggcatcatcgccatgcatcacgaccgtcagcggttcgttgtaccaccccagcggctgcaccactaattgggtgtagtgacctttcgggctggcttccagtacctgtaccggcagcggcgaatcgaggctggtacggcggctgatatccacttcccaagggcgcaggaagagatccaccggcccctgatacgcaggtgtatagcccagcggccagcgatgtgcgccaacatggaactgcccgccgcgaatggttccctgcaggcggttcacttcgcccataaattcgagtacaaaacgggtcgctggttcgcgccatacctgatccggcgcatcagcctgttcaatattgccctggctcatcaccactacacgatcggctacttcggtcgcttcttcctggtcgtgggtcacgaacacgctggtgaatttcagctcttcatgcagttgacgcagccagcgacgcagctctttacgcacctgcgcatccagcgcgccaaacggttcatcaagcagcagaatttgcggctccacggcaagggcacgcgccagcgccacacgctgtttctgcccgccggaaagctgcgccggataacgatccgccagatgcgcaagctgcaccatctccagcaattttatcactttcgctttgatcgccgccgcattcgggcgctcgcgacgcggcagcaccgtcaggccaaaagcgatattgtcgaacaccgtcatatggcggaacagcgcgtaatgctggaacacgaaaccgactttacgatcgcgtgcgtgcaggcggctcacgtcggtgccgtgaaagcgaatatgcccgctggtttgatgctccagcccggcgataatgcgcagcagcgtggttttcccggaaccggacggccccagcaacgcgaccatctgaccagaaggaatatccagtgagatatcgttcagcacctgggtgcgaccaaaagacttcttaatattggcaatctcaatgctcatgatgctcctcctgctgcgcgcgtttttcctgattctccagacgccactgcaacatactctttaaaaacagggtgataatcgccatcagcgtcaacaacgcggcggcggtaaaggagccgacggtgttgtagtcctgctccagcaattcaatctgtaacggcagcgacagggtttcgccgcgaatcgagccggaaaccaccgacaccgcgccaaactcgccaattgcgcgggcgttggtcaacaccacgccataaagcagcgcccagcgaatgttcggcaatgtaacgcgacggaacatctgccagccagacgcgccaagcaaaatcgccgcttcgtcttcctggctgccctggcttaacatcaccggtaccagctcgcgcaccacaaacggacacgtcacaaagatggtgaccagcaccattcccggccaggagaacataatttgcagattatgttcatccagccagccgcccagcgggccgttggagccgtagaacagcagatacaccagaccggcaaccaccggtgacacggcaaaaggaatgtccagtagcgtcagcagtaactggcgtccggggaagttaaagcgcgtcaccagccaggccagcagaatgccgaacaccaggtttaccggtacggcaatcagcgcgatcatcaccgtcagccagatggcgtgcagcatgtccggatcggccagattctgtaaaaccggcatcagccctttgctgaacgcctgtacgaagatgtaaatcatcggcaccagcaggatgaacgccgaaaccagcatcccggtgccaatcagaaaccatttgccccagttaatcgggcgcgcgtcataacgcttcaattgggtaacttccgccattaatgacctaccacacgccgaccaaagcgactttgcagagtgttaattgagaacagcagtatcagggatgccgcgaggatcaccgaagcaatcgcgctcgccgccgggtaatcaaactcctgcaagcgcacaaaaatcatcagcgacgtcacttccgtcttccaggcgatgttcccggcgataaatatcaccgcgccaaattcaccaagactacgggtaaacgacaacgccacgcccgccaccagcgccggagaaagttccggcagcaccactttgcagaaactctgccagcgcgttgcgccgagcgtttctgccgcttcttcatattccgggcctaactcttccagcaccggctgcacggtacgcaccacaaacggaatgctggtaaaggccatcgccaccgcaatccccagccaggtgtaggtgactttgatatcaaacttcgccagccattcaccgtaaaacccgttcacggaaaagagcgaggccagcgtcaaaccggcaactgccgttggcagcgcaaagggtaaatccatcagcgcatcaagcagcgtgcggcccggaaagcgataacgagttaaaatccacgccatcagcaggccgaaaacgccgttaaaaattgatgccacaaacgccgacagcagcgtcactttgtaggccgcgaccacctgcgggttggtgatcacttcccagtactgcgcccagctcatctcagaaagctgcatcaccagcgcggaaagcggcagcagcaatatcaggcacacaaacagcagactggtgccgaggcttaaggtaaagcccggcaggacgcgtcttgatgaaactgcaaacattaattacgccccgccgctaacagcttgtctaactcgccgccgctggtgaagtgtgttttcattacttccggccaggagccaaatttgtcttccacgcggaacagctcggtctgcgggaatttgtttttcagtttgtccatgacttccgggttatttacgcggtagtaatagtcggtgatgatagtctgcgcctgcgggctgtagagccagttcaggtaggcttttgctgctttttccgtaccgttggcctgcacgtttttatcgacccacgccaccgggaattccgccagaatgttggttttcggaatcaccacttcaaagccctgcgcttcatactgtttgcggatgttgttcacttccgactcgaagctgatcagcacatcgcccaggccgcgctcggcaaaagtggtggtcgcgccacgaccgccagtatcgaacacttcaacgtttttcaggaactgggtcataaactgttcggttttggctttgtcgccaccgtcagctttatccgctgcgccccatgccgccagataggtataacgcgcgttacccgacgttttcgggttcgggaaaatcagcttcacgtcggagcgcaccaggtcgttccagtcgtggatattcttcgggttgcccttacgcaccaggaagcccatggtggagtagaacggcgagctattattcggcaggcgcgactgccagtccgccgggataagcttgcctttatcgtgcagaatttgtacgtcggtcacctggttataagtgacaacgtcggcttttaagccctgcaaaattgccagcgcctgttttgatgacccggcatgagattgttttatcgtcagtttgtcgccgccgttatctttggcccattgctgttcaaacggcgggttcagggcggcaaacagctcgcgggagacgtcataagaactgttcagcagttccgttgcctgtacatggcccgccagcagcagagaagcgaccagcgcgagtgagttctttttcagtaagttaacggccattgcgcacccttataaatttaatgactttctaatagccatcatatttataacggacgtgaaaggagtaacggttttatataccgtttggtgatttggaagttgaaaagggaataagacgaaatcctccccacacatgcagggaggaaacagaggtgaatcagataccgacgctgaccgtctccggcagtgtgctgccgccatcaatcacattctgtgtaccggttaaatagctggattcatccgatgcgaggaaggccgccagttcgccgacttccaacggatcggcgaggcgacgcatcgggattgctttcgccatttcagtcagcaccgattctggatcttccgggttcgactggcgggcaatgctttccgccattggtgtgcgaacgtatccagggcatatggcgttaacgcgaataccagactgcgcatactccaccgccagcgattttgtcaggccaacaatcgccgctttcgttaaggcgtacgccgtttcacccggatcggccaccatatcgccagtgaccgaagacatcatcacaatgcgaccatctttgcgggcaatcatctccggcagcaccgccttcgtgacgttccatacgcctttaatattgatgtcaatatggaaatcgcgatcgtcatcgctcatatcgaggaaactgcccagacgacaaacgcctgcgttattcaccaggatatcaatgcgcccttctttttccttcgcgcgtttgatagctgcggctaccgacgccgggtcacgcacatcggcgacaaccgccgtacagcgatgaccacgaccacacagttcgtccgccagcttttcgatctcaggggagatatccagcaagattaggtttgcgccatgacgcgcaaaagttctggcaattccttcgccaattccctgcaatgcgcccgtaatcagtgctgtcttgcccgtgagtttacccattttaatgctctccttgttaatacagagcgttacactccattccctctgaaaatacaggataaacaaaatattgctgcggatcagctcactaattcaggaaaatctcaatccagtcgctgctttatgcatcatttcaggcgttgtgttagctcactgctgcgctgaatcattttcaatgactccacatcattgagttgcacaagaccaacaaacagtaaatcggtaacagaattttgcgccgtgcgggtagacatcgacgagctacgccattcggtttcaccggaaacggtatcgagcgtgaaatgcgccagccgccgcagcggagaatcagccagagaagtaatggcaatcaccgttgccccctgctttcgtgccgcttctgcgcataagacaatctcttttttactgccgctgtaagagatagcgatttgtacatcgccttttttcaacgcctgggaaacggtggcttgtacgtgcgtgtcggcttcgcaggccacgcgatagccaattttcatcagtttgaacgacagatcgcgccccaccagcgccgatccgcccaggcccgttatctggataaacggtgctttactgatgacctcaatgattttttgcagccgcgcgtagtcgaacaacgcacaggtttgctccagcgccagctctttttcgcgattcaatttgcgggcaatcacttccagcgaatcatcactggtaatcgaactgtgcaggtgcagcgccgtggcattcgttttctcccggctggcactgtattcgcctattaacgccatacgcaattcagtaaatccttgcgcgccgagtttttgggcaaatttcactatgctcgactggctaatgccgagctgtttcgccatctgccgtgaagaaacggattgcagctcactcacgttggcctgcagaaagtcagcgattttttgctcgttttcggtgaattcactccccgcattgcttattttcgtcaggtacaacatcttccactctcctgggctggcagcataaattccgcttaagttcttatgacgctcttcacactctgcgagtgtagactcaatgattcctttaagtctgtcaattcgggatatatgattccatacatctgcaattatttgatcgtaaatagtaaggtcaccaccgatgcaactagaaaagatgattactgaaggctcgaacaccgcctcggctgaaattgaccgcgtatcgacgctggaaatgtgccggattatcaacgatgaagataaaaccgtaccgcttgccgttgagcgcgtcctgccggatatcgccgcggcgatcgatgttatccacgcccaggtcagcggcggcggtcgtctgatttatctcggtgcgggaacatccggtcgtctggggattctggatgccagcgaatgtccgcccacctacggcgtgaaaccgggtctggtggttggtttgattgctggaggcgaatatgccattcagcacgcggtggaaggcgctgaagatagccgggaaggtggtgttaacgatctgaaaaatattaatttaacggcacaggatgtggtggttggcattgctgccagcggtcgcacgccgtatgtgattgccggactggaatacgcacgccagctcggctgccgcacagtgggaatttcctgtaatccggggagtgccgtttccaccaccgccgagtttgccattacaccgattgtaggtgccgaagtggtcactggttcttcgcgaatgaaagcaggcacagcgcagaaactggtgctcaatatgctttccaccgggctgatgattaaatctggcaaagtgttcggcaacctgatggtcgatgtggtcgccaccaacgaaaaactgcatgtgcgccaggtcaatatcgttaaaaacgccaccggatgtaatgccgaacaagcggaagcggcgttaattgcctgcgagcgcaactgtaaaacggccattgtgatggtgctgaaaaatctcgatgccgcagaagctaaaaaacgcctggatcaacacggcggctttattcgtcaggttttagacaaggaataacccatggccaaagagatcagcagtgaacttctgaacaccatccttacccgtgtcggcggaccgggaaatatcgccagttgtggtaactgtatgacgcgcctacgtctgggtgtacatgacagttcactggttgatcccaatatcaaaacgctggaaggcgtgaagggcgtcattttgaccagcgaccaggtgcaggtcgtttttgggcctggtaaagcgcatcgtgccgcaaaagcgatgagcgagctgctgggcgaggcaccggtacaggatgccgcagaaatcgccgcccagaacaaacgtcagttaaaagccaaacaaacctccggcgtgcaacaatttctcgccaaattcgccaccatcttcacgccgctgatccccggttttattgccgccggtctgctgctggggatagcgacgttaattgccacggtgatgcacgttccggcagatgctcagggcacgctacccgacgcgctgaattttatgaaggtgttcagcaaaggtttgttcactttcctggtgattctggtgggctataacgccgcccaggcatttggcggcacgggcgtcaatggcgcaattattgccgcactctttttgctcggttataaccccgctgcaaccaccggttactacgccggttttcacgatttctttggtctgcccatcgatccgcgcggcaatattatcggcgtgctgattgccgcgtgggcctgcgcccgcattgaaggcatggtgcgccgctttatgccggacgatctcgacatgctgctgacctcgttaatcaccctgctgatcaccgctacgcttgcgtacctgatcattatgccgctgggtggctggttattcgaaggtatgtcatggctgtttatgcacctgaacagtaatccgttcggttgtgcggttttagccgggctgttcctgatcgccgtggtatttggcgtgcatcagggctttattcctgtttacctcgcgttaatggacagccagggattcaacagcttatttcccatcctttcaatggcaggcgcgggccaggtgggcgcggcgctggcactctactggcgggcgcaaccgcacagtgcattacgcagtcaggtacgcggggcgattattcccggtctgctgggcgttggtgaaccgttgatttacggcgtcaccctgccccgcatgaaaccgtttattaccgcctgtttaggcggcgcagcgggcggtttgtttatcggcctgatagcctggtggggtctgccgatgggcttaaacagcgcctttgggccgtctggtctggtggcgctgccgctgatgacttccgcacaaggcatccttccggcaatggcggtttatgctggcgggattctggtggcatgggtttgcgggtttattttcaccacgctctttggctgccgtaacgtcaatctggactgatatcatgaaacggacaatgctctatctttctctgctggctgttagttgtagcgtcagcgccgcaaaataccctgttctgacagaaagttcgccagagaaagcagggttcaacgtcgaacggcttaaccagatggatcgctggattagccagcaagtggacgccggttatcccggcgtaaacctgctgatcattaaagataatcagattgtgtatcgcaaagcctggggagcggcgaaaaagtacgatggcagcgtgttgatggaacagcctgtcaaagccaccaccgggacgctgtatgacctggcctcaaacaccaaaatgtacgccacgaacttcgccctgcaaaagctgatgagcgaaggcaaactgcatcctgacgatcggattgcgaaatatattccggggtttgccgatagtccaaatgacaccattaaaggcaaaaacaccctgcggatttctgacctgctgcatcacagcggcggtttcccggcagatccgcaatacccgaataaagcggtcgcgggcgcgttatattcccaggataaaggccagacgctggagatgatcaagcgcacgccgctagagtatcagcccggcagcaagcatatttacagtgatgtcgattatatgctgcttggatttatcgtcgagtcggtcaccggtcagccgcttgaccgctatgttgaagagtcgatttatcgcccgctcggcctgacacatacggtatttaacccgctgctgaaaggctttaaaccgcaacaaattgccgccacggaattgaacggcaatacccgcgatggcgtgatccatttcccgaatatccgcacctccactctctggggtcaggtgcacgatgaaaaagccttttattcgatgggcggcgtttccgggcacgcaggtttgttttccaataccggcgatattgcggtgttaatgcaaacgatgctgaacggcgggggctatggcgatgtgcagctgttcagtgcggaaacggtgaagatgttcaccaccagctctaaggaagatgccacttttggcctcggctggcgcgtgaatggtaatgccaccatgacgccgacgtttggcacgctggcaagcccgcaaacctacggtcacactggctggaccggaacggtgaccgttatcgatccggtgaatcatatggcgattgtgatgttaagcaacaagccacattcgccggttgccgatccgcaaaagaatcccaatatgttcgaaagcggtcagctgccgattgcaacgtatggttgggtagttgatcaggtgtatgcggcgttaaagcaaaagtaataaaaaggccagtcagtaatgttactggctggtctgagagtgctgacaaacgcaaaactgcctgatgcgctacgcttatcaggcctacgtggagcccacaatatattgaattagcacgatttcgtaggccggataaggcgttcacgccgcatccggcgtgtacaacgcgcacttggtcaacaatctgaggccagtcagtaatgttactgcctggcctttaatcaatgaatcagaaacgcttacagcgccatcaacttgtccagcgacggtgcgaaataatagccgccggttaccggtttggtgaaacgcaacatcgcatcacgcttaccatcggtatcgccaaacatgctcagcagttgctgctcaatgttatgcagacgcgcgcagtaggcgcagaagtacagaccgtgagtgccactggcagtgccgtacggcaggctctggcgaacaatcttcagccctttgccatcttctttcagatcaacgcgggtgaggtgagaggtttccggacgttcgtcgccgtcgatctcttcgttggcctctttggtgcgcccgatcatcatctcctgatcgtgaacgctcatccggttgagctgcttcaggttgtgttcccaacgctggacaaacacatagctgccgcccgcatccacgccgtctttgataaccgccacttcgcgacgcgtctcttcacccgccgggttttccgtaccgtcaacaaagccgctcaggtcacgctcttcaacccaacggaagccgtggatctcttctttcacttcaatgcagtcaccaaaggcttccatcgccgcctgggcgacagagaagtttacgtcgtgacgcagagaaagaatgtggatcaacacatcgaactgggtcgtcggcgcaaggcctttaccgtagcccggaaaatctttcagctcttctgccccaacgccgccgctcagagcgcgccaggtgttgttaccaaaggcaaccaccgcaccaagatgcgcgtccgggaatttcgcttcaaaagttgccagtttgtcggcaaatgttttactggccgcacgcagggcgtcaacttcccctttcacgttggcttcgatccaaatcgccgcgcggcaatgttctggcaaaatgccactctgaacctgagacattgttcctcctgaaaataataatgccacgcaatccgtggcattgttgagcgctattttacgtgttttttcgcggcggcggtttgttcagacgcaaattaacgccgccagataattttactgactttccagtttttcagggtatcgtccgaaggcattaacccttcaggaccactccattccccgctgaactggtagctaatatgttgactgccttcggctttacattcgacggcacgattatcatcaccatcagctttttggcaattgccaaatgctttgctgtaaaggtcgctaaacggtgtaccgattttaacaccggtgtcagcaggaatatcgctatccagcacgtcaatgcgactgatcgtgccttgatcgccgttaatcaccatcgccacgttgtcgcccttcatcacttcaaaaaagcgcaccacgttgccgttcgcggttttcattccgctgcgcaggcgataatcgccatcaagcgcatcggcaatggcttgttcttgcagtggtgtggacgccgttaattcaccaacgccctgctcgctcactttggtggacgacccaaaccagttccacgggttagcggcagaccagttaactgacgacatcgtggaacagccggtcagcatcaatggcatagcgcataacattaaacgcagcgatttcatgtcacttcctttggttattcaataacgttgcttggagtgcaaattcaccaaaaagtgccgttattcttttacttcattaaaacaagcgcgtaaacgtcgattggtcagcagccagattaacgccacaatatccgccactaccagcgccagaccgataccgctaacggattcaccgttcagccacagccacggttgccagcaaagtaaaaccacctgcgccaacagcaacagaaaatagagtacacgccaggtgcgaggaaacgtagcccgccgaccgctcaacaaaaacgccagcaccgccggaatgccaggaatcagccccagccagaaattatcgtgatcgggataaaacagatttagcagcgcagtaccctgctcacgcgacgcaccggcaatgacaaacagcacccaggttcgcgcctgaagcaatagcacaagccagaagagcaagggtaaacgcaggcgtccgtgcgcatcataatggacaggatggaactcagtactcttcatcttcaatcaaacgcttacccagactcagcacgtcggcgtgttcatatcccaggcgttcatacattccgagcaccatgtcgttatcttccggcacattgatctgaattttcgggcagccacgagcaatcagctttttctccagccgattaagcaacgcattggcaatcccacgcccacgaaactctggatgcacgccaagataataagcagacccgcgatgcccgtcataaccgcccatcaccgttccgaccacttcaccgtttacctcagcgaccagaaacaaactgacgtcatggttcatcttacgctcgatgtccatttccggatcgttccacggacgcagcaagtcgcaacgctcccaaagggtgatgacctcttcgaaatcttcctggcgaaatacgcgtatctccatggtattcgttacctttttgcgggttaaaaggctgattatggcgtgaacggtcgaattagccaatatctgacgaaaatcggttgaaaaagtggcataatggggagttgtcaactattgaaatgaaaagtaaaacaattctcaacatcaaaccgtcgtaacggattacgcgatacgatataacatctggaactttattattacaactcaggccgtatgagcacttttaaaccactaaaaacactcacttcgcgccgccaggtgctgaaagccggtttggctgccctgacgttgtcaggaatgtcgcaagccatcgccaaagacgaacctttaaaaaccagcaacggacacagcaagccgaaagccaaaaaatctggcggcaaacgtgtcgttgttctcgatccaggccacggcggaattgataccggagcgatcggacgcaacggttcgaaagaaaaacatgtggtgctggcgattgctaaaaacgtccgttccattttgcgtaatcatgggattgatgcgcgtttaacgcgttctggcgatacgtttatcccactttacgatcgcgttgaaatcgcccataaacatggcgcagatctgtttatgtcaattcatgccgatggctttaccaacccgaaagctgccggtgcttcggtatttgccctctctaaccgtggggcaagtagcgcaatggcgaaatacctgtctgaacgcgaaaaccgcgccgatgaagttgccggtaaaaaggcgactgacaaggatcacctattgcagcaagtgctgtttgatctggtgcaaaccgatactattaaaaacagcctgacgctcggctcgcatattctgaaaaagattaagccggtgcataaactgcacagccgcaacaccgaacaagccgcgtttgtggtgttgaaatcgccgtcggttccttcggtgctggtggaaacctcgtttatcaccaacccggaagaagagcggctgttaggcacggcggcgtttcgtcagaaaatcgccacagcgattgctgaaggcgtgatcagttatttccactggttcgacaaccagaaagcacattcgaaaaagcgataagttatgaaacccgacgcacaccaggttaaacagtttctgctcaaccttcaggatacgatttgtcagcagctgaccgccgtcgatggcgcagaatttgtcgaagatagttggcagcgcgaagctggcggcggcgggcgtagtcgggtgttgcgtaatggtggtgttttcgaacaggcaggcgtcaacttttctcacgtccacggcgaggcgatgccagcttccgccaccgctcatcgcccggaacttgccgggcgcagtttcgaggcgatgggcgtttcactggtagtgcatccgcataacccgtatgttcccaccagccacgcgaatgtgcgtttttttattgccgaaaaaccgggtgcagagcccgtctggtggtttggcggcggcttcgatttaacccctttctatggttttgaagaagacgccattcactggcaccgcaccgcccgtgacctgtgcctgccatttggtgaagacgtttatccccgttacaaaaagtggtgcgacgattacttctacctcaaacatcgcaacgaacagcgcggtattggcgggctgttctttgatgatctgaacacgccagatttcgaccactgttttgcctttatgcaggcggtaggcaaaggctacaccgacgcttatttaccaattgtagagcgacgtaaagcgatggcctacggcgagcgcgagcgcaattttcagctctaccgtcgcggtcgttatgtcgagttcaatctggtctgggatcgcggcactctgtttggcctgcaaactggcgggcgcaccgagtcgatcctgatgtcaatgccgccactggtacgctgggagtatgattatcagccaaaagatggcagcccagaagcggcgttaagtgagtttattaaggtcagggattgggtgtaactccctcacccccattcccgcatccgctgatgcaacgtcaacgacggcttctcggcaaacagctgctggtaatccgtggcaaattgccccagatgccagaatccccactgcatggcggcgtcttttaccgttgtgctttgcgaccacgggcttatcagttcgcggcgtacggcgttcaggcgaatgcgtttcagccacgcgtttgggccaatgcctaaaatagcgtgaaacgcgttttgtagcgtgcggcgactgacatgcagttgattacacaagtccagcaccgtcaccggctcagacatattttccagcacatattcacgggcgcgggaaagtaatctacggtaactctgatgactgatgctttccgccgtcaccattggttgcgcgtcttccagcatcgcccccatcgccattagcaaattatcccccagcacttttcgcactgcaggctgatggagattttccgggttctcgcaaaacgtcgccagcgcctgttggacaaagccccacagcgcggctttatgctgctctttcacttccagcgccgactggctacgcagcatatgtaatacccgatccgggttatgcaaaaagttagcctgccgggtgatgacatcttcagaaagcaccacgcccaggatcgtgtaatcatccggcgtgctcagttcaaattcagtgccaccagggcgggtggcgatttccgcgcttcccagacattgcgaaccgataaatccctgctcaccgcgcgtcgccggaatgccaaaccagaacgagttcggccagaccaggcacgactgacgcagcgccagaccggtgtattcacgaaaaacctgaatatcatcgagtagaatttccgtaaattcaccatgaaacttgcccggatgcagctgatcgtaaatctgctgccaggcggtaatcgttaaagcatgttcatagacatccgttgtctgtcgttgatgaacattatccacttcgaccttcggcgtgagcttcaggttttcgggtaagggttcatgataaagatggtgcaaattggctgtacgggtctttttcatgatgttaatgccgggtgttgtaggacacccggcacctccgacaggttaatggggcttgagacgataacgactactgcgtttacgtaacgtcccggcagaaaagagctgttcgagcgcatttctggctttttccagcggccagccaaagtgggcagccacttctcctgccgtcattccctgacgtactgatgttaacagcgccaacaactcgtcagcagattccgcgacgataactggcgcgtcgggttcccttacgggttgcttcggctggcggttaaagccagtaaccagccactgggtgtcatcgtctggccgaccgatctccttgcggctgatgacacgcccggtacgcatcgcggcagcacaacctgcgtccagcgccgcacgacacgccgccagatcgccttccaccaccagcgttaagcgaccagggtcaagcacttcgtgactgagcagacgaacgttagctgctttgagcatggcatccgctgcatctatcgcggcgaccatgccgtccacttccagcaatcccagtgcattgatcatcggcaacctccgttacgcacgctggattggattacgcgcgatttccagcactgcatcggtaaaggcgttacaggctgctttacacgctgcctggctaccggttaaaaatgctgccgagtagttggtttcagacggtggcgggacataggtcgccagctgtacgtcggcagacttcagggctgcatcaatgccataggtcgcttccagcggcggtgccaccagatacgccatcggatcgccaagcgtgatcccggcggttgatgagagataagaaccggtacgcgaaactacatgtgccaggaatgccgtatcttgcgcgtcattagcccactggaaagctgcgccattttcaatatgcgcaatcatcgcatccagacctgcacgcacttccgccgggtttggcccaccaagcataatcagcacttcaccggcagtcggtgacgggccgtgtgccgctcccgcatacagcgagcgaccatataccacttcgaccatcgcttgtttggtcgcttcgtcagccgcaatgtaggtgacgtcgtcagaatcggcagaaatcagcccgaggctacgaatatgcggcggcaattttagttcacgcgcaaattcagcgttaacggaggcaatcacccgcatggcggttaccgacggtcgaatcaaatctaaagctggcatgatgcctccttatcgggtcatgttgatgccggatgctttctgctccagcatacgtttcgccaaatccacaatgacggctgcggcttcaaccggcggcgtgccgccctggtgaatgttagagatacaggtgcgatcggcctcaacggtggtcgccatacgcggcgagtaaacggcgtagcaggagaggctttctgactgccctaaccccggacgttcccccaccagcaggatcaccactttcgcgccgaggatctcaccgatctgatcttcaatcttcacgcgaccataacgaacaaagaatggcgtgccgactttcagcccggcctgtttcaggcccgccatcagcggcggcaggatctcttcgtagttgacggtgatggcatcagttgacaggccatcagaaataacgacctgtacgtccggattagcaacacactgtgctttcagcgcttcaacagcttctgcacacaggcggcggcccatatccgggcgagtcaggtagagatttttgtcgctaatttcagagcgtacttccagcaagccctgcgctttcacccactcttccggcacttctttcagtacggtatctttcgaacgagagtgatcggccaggaaacgcagcagcgcctgggtacgtggacgcggaccggcacgaccggtacaaacgcgggccacggtgctgcggcgcagttctgttaatacgtctgcgcgatgcgggttttcaacaccaatccacgcttttgcttcagcggaacctaaatccagcgcacagctttccgaggtcaccggtgccgcacagttggtggtggcgcactttgcttctgacggcgcgggggccgtttgtcccattgacgccatcacgctgcgtacaatttcttcaatctgtttttgatccatgatgtgttatctccgcgtcatcagaagaacagtgacggatcgcccgcccgtttggtcaggcgaccgtttgccataatgcccatgctttccagccagcgttcaaactccggtgacggacgcaggttgagtaactgacgcacagtggcggtatcgtggaatgcggtggtctggtagttgagcatgatgtcatcacccagcggcatccccatgatgtagttgcagcctgcggtggcgagcaggatcatcaggttttcgttgaggttctggtcagcgtcagcgtggttggtgtagcagcagtcacagcccatagagatgccgctcagcttgcccataaagtgatcttctaagccagcacggataatctggcggtcgttgtagagatactccggcccaataaagccgaccacggtgttgacgataaacggatcgtaatgacgcgccagcccatagttacgtgcttccatcgtcacctggtcagcgccgaagttagcgccagcggatagcgcagagccttgtccggtttcgaagtagaggcagttttccccggcgatacgattgaactctgcgcccactgcgcgcgcttcgtcgagcatcgccagttccacgccaaactctttcagccctttttcgctgccacagatactctggaaaatcagtccgccaggcgcgccgcgacgaatcgcttcgatctgggtggtgacgtgcgccagtacgcagccctgagttgggatgttgaatttgtcgatcacgccataaatggtatccagcacgcggcttaagttttccacgtcgtcagttaccgggttaacgccgatcaccgcatcgcccaccccaaaggaaagcccttcatagatttgcgcagcgatactttgcacgtcgtcacgggtatcgttcggctgcaaacgggcgctaaaggtgcccggaataccgatggtggtattggcctttttgattaccggcattttcttcgcgccgtagatcaggtccgcgttggagcaaatcttcgctaccgccgcgaccacttccgaggtcagccctttgcgggtaaaggcaatgtcgtccacgctggtttcatcgctcagcacatactcacgcagttcgctgatgctccagtttttaatctggttgtaggccgtttcgttaacgtcgtcctgaatcagccgcgtcacgcagtcatcttcataggcaatcaccggattattgcggatgtccgctacggtcatttccgacaacacctgttttgccgccacgcgctcctgtgaacttgccgctgcaacgcctgccagcacatcccccgaacgcagttcgttggctttagccagcacctcttttacatccttaaactgatatacattgccgaacaatgtggtctttagtttcataagtcgttccctcaggaaggaaatgcgagtgatttcaccgtcaccggcacaaccgatccgccaaaaagaggcgtaccaatgtcgatatagtcccccgcgcggacaatcacttcgtcaatgactgccaacgggagttgttgtagctgtgggcgcaacaacatgcccagagctttaccaaagtcctgcccggccaccaccagcaggggatgcggattcggaaaacgcgcgacgaaatcgaccagcgcgttgatgaccgtcagtaccgcggcgtaacgcacaggcagcgaggcgggaagcgccagcacgtacgcgtcagttttgggatcaagatccagctgaagcagcgcctgttgccaggcactcaccagatccgtttcatcaatcgggatcgccaccggcaaattgcgcagcggcagttgtacgccctccagccagattgtgctgccagagagcgaaagggtatgtgcacccgcgccaatcaccgtggcgcgtacggtttgcgccggaaactgcacattcatctcacgcaggcgcggatggtcatgcagcgccgttgccagaagtgggccaatatcggcaaaacagaacgggtcggcgggctggtggcgataacattcgcccacgcctccagaaagcgtaatgatttcgggcgtaacacctgcgggcagcaaaccggtttgcatcaatgcctgcgcgagcggcgaaagcgttccgtcaatcacttcgacaatcagcgccgccatccgccgggtaacctgcaccagctgcgcgccggtcagcgaacgggcgtcagtgcctgcaccgaagcactcatccacaatcatctgccccggtttatgagcgtaaaccacgcgcccctggctgtcggtttccagcaggcgaccaccgacgttgagacaggcagtgccgctgatttttccggcatcgaacagggcgtagttcgcggtgccaccgccgatgtcgatattcagtacccgacacagccgttgttcagaaagggtttgcgccccggctccgtgaccggcgatcacggattcgaggtgcggcccggcgctggcgacgacaaaatcgcccagcgactgagagagcgccatcaccgccgggcgagcattgcgggttttcgcgctttcaccggtgatgatgatggcaccagaatcaacgctttccggcgcaatgcccgcagcctgatattgctctaaaatcagcgatttcagttccgcttcttttaaaccaccctgtttatcgacaggggtaaagaacaccgggctttgccagctaatttcgcgtttgatgaattcgtagcgcggcacctgcgacaccgccgcacggttaaccagctccaggtgggagaaaatcacctgggtggtggtggtgccgatatcgataccgacgctcaatagctggcgagtgttcacgattgtgcctccgcttcggttttagtcgcggtcgcgtcttcattttggcaccagcatcatcgccacgccaatcgccgttacgccgccgatcaacttgccgacaatcatcgggaagatcatggcgttcatgttggcagcggcgaagcctaagtggtcgcccagggcgaaagcagcggaaacggcgaaggcgcagttgatgactttgccgcgggtatccatctgcttcatcatgccgaacatcgggatgttgttggcaagcgttgccaccatgccggctgccgcgatgttgttcatattcagtactttaccgacgctcatcagcggtttttcaaaccagcgagtcagcagcagcaccatcggatacgcccctaacagaacgcaggagatagaaccgataacttcaatggcgcgcatcacctcaccgggtttatcgccaggggccataaagataggatccagaccggggatcagttcccagccaagcaggaatttcactaccgcagcggcaagaccgagggtgatcaatgcaacgaggaatttggcgaagatctggaagccgttgatcattttttccgggatgaatttcagccccagcgccaccagaatcgcaacaatgatcaccgggatcatgttcatcaggatcagggcgaaagtgaattccaccggctggccgttgatctgcacaccggagtacatagcaaccagaccaccagcgatacaaccaatcggaatggtcacaatgcccgccagcacgccgagcgccagataacgacggtcagaaggttcgataatgccgagcgccaccggaatggaaaacacaatcgttggccccatcatcgacccgagaattaacccagagtatagccacgcggctacgtcgccgcccgccagctctttggcgaggaagaagccgcccatatcgcacgccagcagtgttccggcgaacatcgatgggttagcgccgagcatttcgtaaaccggaataattaccggcccgagaacgtgagccagtaccggtgccagcgcggtcataccgaccatcgccaggcccagtgcgcccattgccataaagccttcttcgaactgaccgcctgatccttcgatacttttaccgaacttaccgaggaaacgagcagaaccgccgaactgcgacaggatcctgtctacggcagctatcagcataaagaacatcatgatgtacatgatgatttcgttaattcccatcgcctttactccctgttagttgttatttattggcggatgcggcgtaaacgccttatccgccctacatgtgcaatcccgtaggctggataagacgcggcaagcgtcgcatccggcaattgcaccgcgccactggcggatgcggcgtgaacgccttatccgccctacatgtgcaatcccgtaggctggataagatgcggcaagcgtcgcatccggcatttattgcgccgctgcgtacaggccgacaatctgctccaggctggcggtacgcgggttactgcgcagacaaatatcttccagcgcggcctgcgcccatgcgccgtaatgcgcagatgtcgcaccaacatcgcccagtcgtttaccaatcccaacttccacaatcagctcacttaccgcgttaatagcgtcacgatcgtcggattttttagtacgcagtgcccgaccaatctgactaaagcgttcgcgacaaaccatccggttaaattccatcaccgttggcagcaacatggcgttcgccagaccgtgtggaatatgcagcgccgcgcccggctgatgcgccatcgcgtggcacaacccaagacccgcactggaaaacgccattcccgccatacatgaagccagcaacatgctctcgcgcgcggcaaggtcgtgaccgtagcccaccgctttcggcagcgatttgccaatcatcgcaatggcaccaatcgccagactgtcggtaaacggtgtagcgttcagggcgctgtatgcttcaatggcatgggttaacgcatcaatgccggtcatcgccgtgacatgcgacggcacaccttcggtcaatgcggcgtcgaggatcgccacatccggcatcagcgaggcatgggctaacacctgcttgcgcccgctcaccgcgtcgataatcaccgttacattggtggtttcagagccggttccggcggtagttggaatggcaatcagcggcaagcgcggttgcagaacgctggtttctgacatctctgccagcgtgctatccgggttcgtcaccagcaacgtcacggctttcgccgcatccagcaccgagccgccgccaaacgcgatcaccccatcacagcctgactcacgcaactgcgccacggctgcacacacgtcggtaatgcacggttcgcccaccggacatggccagagcgtcatggcgatacctttaacggtcaggctacgcgtcagcccggcggtcatccctgcctgatgcaaaaagctgtctgccatcacgaacagatgtttcagcccacgcgtttgcgcttgctgtccgcaactgctcaccgagcccggaccgcaaagcgtcaccggtggaacgctaaatgtttttacccgttgcagattcagggtatcgaacgcctgaaagagcgcggtctgcaattcattttgcatatagcccctccgctttctctcgcccactactggcgatcgccagcggggtcataaacaaactgtgctgcggtaaatgcacctgtaacgccgggaattgtttgcgaaacagttccgccacgcccggttgcatacaagagccgcccgccagccataaatcagtaatgccctgcccttcaatatgccgggcgacaatgtccgccattttttcgtacaccggtttcaccgcaggccaaatctcttcaccgtgaccgcgcttgtactgctccgcctcttccagcgaaatacggcgatttccggcgagagtcagagagatgtgatgtccgccggtggcttcatccgccgagtacgtcaccttgccctttttcacgatggcaatgccggtagtgccgccgccgatatccactacaccggcgttgtccagttgcagcagatccgcaactgcggttggctcatccagcacatggctcacttccagtccggcagattccagcacgttgatggaaatacgcgggtccgtacctggaggaaatgaagtcgccgcatggctaaaacgacgaccgaattgctgctcgagcgtgtcgagatggcgacgaacaatggtgacagcgccgaagaaatcccagacgatgccgtcgcgaaccacatcggcccagtcgaggcataccgccactggctgaccgtcgcggtcgacaaccatcgacaccacatcgcaggtgcccagatccacccccagccacagcggagattccgtcgcggcgggcgtctggttacacagcgttgccgccgtttgcagacgtggggtgagccattgttcgtcgtgcgccatctgttactccttaaacaatgcgaaacgcatcgactaatacacagcgacgcagacggacaaacgtacgcgcgctggttaccccttcaccggttggcgtggtgatggtcatggtggtccagccttccccgcccagccccagcccggcaatgcacggtccgttcttaacgaaaatgctggtatcaatagcattcgccatctggttcatgttttcgatgttgcgcgagtgcattgccgccgtgtggtggcaaccgccttccagtttcaccgctagcgcaatggcatccgccacgttggcgacgcgcacgacgggcaacaccggcatcatcagttcagtcacggcaaacggatgttctgcggtggtttccacaaacagcaggcgcgtttcttgcggaactttaaggccgattgccgccgcgattttgcctgcgtcgcgaccaacccagtcacggctgacggtgccttttccgcgctcgtcgatatttttcagcaacaccggttgcagctgctgcgcctgttctgcggtcagtttcaccgcgtgctggccttccatcagacgcatcagttcatcggctacgctatcaacaacaatcagtaccttttcgtcggcacaaatgatgttgttatcgaaagaagcgcctttgacgatggactgagcggcacgggcgaggtcggcggtttcatccaccactaccggcgggttgccagcgcctgcggcaatcagacgtttattggtgtgtttacgcgccgcttctactaccgcttcgccgccggttaccaccagcaggccgatacccggaaacttgaacaagcgttgcgcggtttcgatatccggatttgccacagtaaccagtaagttttccggcccacctgcggcaacaatcgcctggttgagcagcgtaatcgcccgctgggagacttttttcgccgccggatgcggggcaaaaatgacgctgttgcccgcggcaatcaggctgatggcgttgttaattacggttgccgccgggttagtggaaggcgtcaccgaagccaccacgccccagggtgcgttttcaattagggtcaggccgttgtcgccagtcagcacttgcggagagaggcactcaacgcctggtgtgccgcgcgcctgagcgacgttttttgcaaatttatcttcaacgcgccccatgccggtttcactgacggcaagttccgctaaatctctggcgtgtttttcgcctgcttcacgaatggcagcaatggctaactggcgcattgccacgctttttaacccttgctgggcgactttggctgccgcaacggcgtcatccagggacgcgaaaacgcccatctcatgaacggcggcggacggcgtgtcactgctttgcattttcagcagtaccgctttcaccacctgttcaatatcctgttgattcatgatgttctgccttatttgtggaaaattacctgaccgccagacaccacctcatcgacaatgccaatcacgcacagatcgaccggtgacgtttcgcttttatgcgcctggcgggcggaactgccactcaccagtaacacccactccccggttcccgcgccaatattgtcgatggcgacggcgcattgcccgtcaggattaccttgtggatcaatcatttccaccatcagcaatttgtcatgcgccagtccgtgatggcgtacggtacaaacaatttgtccagtgacgactgccagtttcatacccgcctccgtggcgtatttcaggtaaaagctccccctaccctccgcagaaggtaaaatgaaaaaggagagagcgtgacgcccgaatcgacgtcacacagggtgattacaggttgctgctatcgcctttcaggccgatcgggaagacttcttccaggtcgccgtgcggacgcgggataacgtgtacagataccagctcgccgatacgctgtgccgctgcggcacctgcatcggtcgcggctttacaggctgcaacatcaccacgaaccatggcagtacacaggccgccgccaatctgcttaacaccaaccagcttgacgcgcgcagctttcaccatcgcgtcagaagcctcaatcagtgcaaccaggccccgggtttcgatcattcctaatgcttccattgtgctttcctctttatcagggtccagaacgggaccgttcattcaaccagtgtttgtaaactgctttcgcggttcacttctgtctgacgcggcacagctgccaccagcgccagctcgataatttcctgcacgctacaaccacgagagagatcgtgcatcggcgcggcaagtccttgtatcagtggcccgacggcacgatatccgccgagtcggcgtgcgattttgtaaccaatatttccggcttccagcgacggaaaaaccatcacattggccttgccctgtagcgggctggcaggcgctttttgcgccgccacttccggcacgaaggcggcgtcaaactgtaactcgccatccaccaccagctttggtgcgcgctcacggacgatttctgtcgcctgctggacgttagcaacacaggggtgacgggcgctaccattgctggaaaacgacagcatcgccacgcgcggctcttctccggtgatggcgcgccaggtttcggcactggcaagcgcgatatccgccagctgcgccgccgtcggctgtggcaccacgctgcaatcggcaaagcccaacgccgggccgctgtactgtggcaacatcaggaaaatggaagagagcgttttacagcctggctgcaagccgataatgcgtaatccggcacgcagcacatttgccgtggaagagaggttgcccgcgatacagacatccgctttaccggcgctgaccattgctgcggcgaacatcagagggtcggtaagtttttccagcgcatccggcggcgttttttcgcccgcgcgggccagccagcgatgagcaaattcttcccgcattgcgaggttgccatgcggatcaatcacctgtagcccgtccatcgccacgccgtgactgagcgcaaactgacgaagttcaaacggattggcgaccagaatgggcgttgccagaccttgttgatgtaaatattgcgcggctttcagcacacgttggtctaacgcatccggaaaaaccactctggcgggcgctcgcaacgccagttcacgacaacgttcaataatcattgcgtttcccccagtcgttgttggatctgcttcaccgttagcggctgcttcgttacgctcaggatcatcatcacgtagaccgtgctcgaaaggcggttcagcgcctgcaaaatgtccgggcgtaatacttcaaagctgcgggtgataaagacctgcgccgctacggtttcggtttcccgcactttggtgcgtagcagattgagcaacgcagcatcgcgcccgtggctggcttccggcaccagatgatcgtggtcgagatagcgcagcggctgatgagaaagccgatgcagatcttcgtcagaaagcccgacaatcgcctggcagcccagcggttcccccagcgcatcggcgcgcataatgttgccaagacgcgaacggatatccgccagccacggctgccacggttccgccagttcaatttgcagccacactgccagcgcaatggtgctgtcgagaaccgcgcgaaaacccagacgcggatcgcttttggcgaccattttttccgccgacaggtgagtcagcgtatccggcttttttgccaccggctggcgacacagttcgcagcacgcctgcggatgttcatcgctactggtcagcccatgaacgggctgcggctgctgctgttcatcgtcaacaaacaggcggccctgctcgtcaataaacttgatgcgcagatggcggctttccagcaactcccgggcagagggcgtcaggcgactgtccgcagggagatggatctctgcgccttcgctgagcgtatggttcgctcttagccatgcttcggtgatgaaatctttcatagggattgccagttagccggccaggcgacatacaggaatttcacgctggatgtcgtaccaaattcgatgctggagcctttcgggataaacatcacgtcgcctgctttggcgatcatggtttggccttcgtggcgaacatgcagctccccttccagcaccatgtcgatttcgtcgtagttcagggtccacgggaagaatgcgttctcccactgcataaaaccggcggccatgctgctgccgtcgtctccggtcacaagatcagtcaagcccacgcaatgcggctctgcgccgtcgaaacgaccaaacttgacgctactgccatcaatcactttgatgccgcctttgccggtcaccgatttgaagctcggctgcattgcgccctgctccagcgactgtttttccttcatcactttttccatcagctgtgcgaccaggctttcggtaaactggccttccggcagctgggcaatgatggtttcgcggatgcgctggctttcggttttgtcggctggcacgctggcgggcacggacgccgttaccgggatcgattcatcacattcggtgatggtaaaacccagtagatccgccacttcacgggcttccggggtaataatgctggcgcgcagaaccacggacattgcctgttcgccgcgcgcgtgtgcttcacgaatatcattcgctgtgatgagttttttcacctgcttcctcctgtttggtgagagatgccagataatccaccagttgctgcacgctttgcgggtcgtggctgtttagctcgaaaatcggctcttcgaaacccgtctcaagcaataactttcgcgttgcggcgacgtcagcatctggcatgtccgttttactgatgacggcgatttgccgtttgctgacgccaatatccagcaacccggcaggcaaccgactttccgggtcatttgcgccatggacatagatcagcatgtctacatcctgtagcgtggtaattaaggcgtgataccagcggggatggttaaaatattcacccggcgtatcaatatcgcccttatcattaaattccacggcctgtgtttttctggcgagggtataattcccctgcaacgcattaaataacgttgtttttcctgccccgacgctacccacaaacgcaattcgtttcatgaatgcctcgtattaacttttggtcatttcacaaagcgtataatttaataagcgacctaaaccgctgacggtttgtgataacgcttcttctactgcgcccaccgagccataaatcaccaatgcaccgctgaatcggtcgagaaaaccgatatgcacatcagcggctttcagcgctaaatcaccggcgatcatcgccgtttcgccgggagttagcgtcataatgccaattgcgcccgcatccggaacgccgattttcttcgccagttcctcaccgggatgcgcgatgagatgcgccagtgtgacctgtttgccgggcacaaattcctgaatgatgcgttctttatccatgagtcgccgcctgtgaaaaactttcgtgtatcgtgacaatttttcgtcagagtaaataacaaaattcggcaagcgcgtttaaaaggtgaggtagatcactaagaatggagagatattcgctgtggtgcataaactttcatatgcaacgcatgaatataaataaaataatatcgagatattatatagactgcttttttttattattcgcaaactcagtaataaactttactaatatattgcagctaaactgcttaccctgaatattcagggtaagcgtgagagttaaaaaaaattacagcggttgggtttgcgcttctaccacggccagcgccaccatgttgacgatacgacgcaccgatgcgatcggcgttaacacgtgaaccggtttcgccacacccatcagcaccgggccgacagtcacaccttccgagctggaaacacgcagtaagttgtaactaatgcgggcagcttccatgttcggcatcaccagaatattggcggaacctttcaaagagctgtccggcatacggtcgttgcgaatcgcttccaccagcgctgcatcgccgtgcatttcaccatcaatcatcagttctggtgcacgttccctgaccagttccagcgcctgacgcattttgctcgacgacgggcagtcagaagaaccaaagttggagtgcgacaacaaagcaacgcgcggctcaataccaaaacgacggacagtttctgccgccatcaaggtgatctccgccagctcttctgcatccggttcatcattaacatatgtatcggcaataaaggtgttaccactcggcagcagcagcgcgttcatggcacctgcggtgtgaacgccatcgcgataaccaaagacatttttcaccacgctaaaatgttcatgataatcacccaccgtaccgcaaatcattgcatcggcttccccacgctgaaccatgatcgcgccgatcactgtcgggttactgatcagcgcccgctgcgcctgttcctgagtgacgccgcgacgcttcatgatctggaagtattcggtccagtactctttaaagcgcggatcggattcgttattgacgatctcaaaatcaacgcccgctttgatctgcaagcccagtttctgaatgcgcatttcgatcacgttcggacgaccgataaggatcggtttcgccagtcccagcgttaccagttcctgagtggcatgcagaacgcgcgcctcttccccttccggcagaacaacgcgcttcggcgctttgcgagcctgggagaaaatcggcttcataaacaggttggttttgtaaacgaactcagtcagcttgtcgatgtagacgtcgaaatcagcaatcggacgagtcgccacgcccgactccatcgcggctttagcgaccgcaggagcgatcttaacgatcaagcgcggatcaaacggttttggaatgatgtattccggaccaaagctcagatcctgatcgccatacgctgaagccaccacttcgctctgttccgcatgggcgagttctgcaatcgcacgtaccgccgccagtttcatctcttcgttgatggcggttgcgccaacgtccagcgcgccacggaagatgaacgggaagcacaggacgttgttcacctggttcggatagtcagaacgaccggtgcaaatgatggcatccggacgcacttctttcgccagcggcggcagaatttccggttccgggttcgccagcgccaggatcattggcgcacgagccattttcttcaccatttcctgggtcagcactttcgggccggaacagcccaggaaaatatccgcgccttcaatcacatcatcgagggtacgtttgccgtcatccaccaccgcatatgcggctttggtttccgccatgtttggctcacggccctgatagataacgccttttgaatcgcaaaccacgatgttatgtttttgcagacccagcgctaccagcaggttcatacaggcgattgctgcggcacccgcgccggaaaccaccatccgcacgtcggagatgtttttctccaccacgcgcaagccgttgaggatggcggcagtgctgataattgccgtgccgtgctgatcgtcgtggaataccggaatattcatccgctcgcgcagtttctgttcaatatagaaacattctggcgctttaatgtcttcgaggttgatgccgccgaaggttggttcgagcgcggcgacaacttcaataaatttgtccgggtcgagttcgtcaacttcaatgtcaaatacatcaatcccggcgaatttcttaaacagaacgcccttgccttccatcaccggtttgcctgccagcgcgccaatgttgcctaaccccagcaccgccgtaccgttagagatcaccgccaccaggttaccgcgggcggtatatttgtaggcttttaacgggtctttttcgatttcaagacaaggtgcggcaacgcctggtgagtaggccagcgccagatcgcgctgtgttgccagaggcttggttggagaaacctggattttccctggaactggaaattcatggaaatcaagtgcactttgttttaactggtcatccatttggttgttcctttcacgtaacgttcacaaataaagtgtgtgggcaacagcccctgcccacaacgtggcgcacattattaccctgccggagtctacagactttgagcaagtccaaactctcaccattaatataatgttttggtaataatcctataacactgatgttacctgcttaatccagcaataccatgcctgtctgctatgcttttttgatgcgtttagcgaaatttctcagaagtgtgaattaacgcactcatctaacactttacttttcaaggagtatttcctatgaacgagttagacggcatcaaacagttcaccactgtcgtggcagacagcggcgatattgagtccattcgccattatcatccccaggatgccaccaccaatccttcgctgttactcaaagctgccggattatcacaatatgagcatttaatagacgatgctatcgcctggggtaaaaaaaatggcaagacccaggaacaacaggtggtcgcagcgtgtgacaaactggcggtcaatttcggtgctgaaatcctcaaaatcgtacccggtcgcgtgtcaacagaagttgatgcacgcctctcttttgataaagaaaagagtattgagaaggcgcgccatctggtggacttgtatcagcaacaaggcgttgagaaatcacgcattctgatcaagctggcttcgacctgggaaggaattcgcgcggcagaagagctggaaaaagaaggtattaactgcaacctgacgctgctgttttcttttgcacaggcacgggcctgtgcggaagcaggcgtttttctgatttcgccgtttgtcgggcgtatttatgactggtatcaggcacgcaagccgatggacccgtatgtggtggaagaagatccgggcgttaaatcggtgcgcaatatctacgactactataagcaacaccactatgaaaccattgtgatgggcgcgagcttccgtcgcaccgaacaaatcctcgccttaaccggctgcgatcgactgactatcgcaccgaatttactgaaggagctgcaggaaaaagtttcgccagtggtacgtaaattaatcccaccttctcagacgttcccacgcccagctcccatgagcgaagcggagttccgttgggagcacaatcaggatgcgatggcggtagaaaaactgtctgaaggcattcgtctgttcgccgttgatcaacgcaaactggaagatcttcttgccgccaaactataaaccagccacggagtgttatatgtcccgaaaagaccttgccaatgcgattcgcgcactcagtatggatgcggtacaaaaagccaactctggtcatcccggcgcgccgatgggcatggctgatattgccgaagtgctgtggaacgattttcttaaacataaccctaccgacccaacctggtatgatcgcgaccgctttattctttccaacggtcacgcgtcgatgctgctctacagtttgctacatctgaccggttacgacctgccgctggaagaactgaagaacttccgtcagttgcattcgaaaaccccaggccacccggagattggctatacgccaggcgttgaaaccaccaccggcccgcttggacaaggtttggcgaacgccgtcgggctggcgatagcagagcgtacactggcggcgcagtttaaccagccagaccatgagatcgtcgatcacttcacctatgtgtttatgggcgacggctgcctgatggaaggtatttcccacgaagtctgttcgctggcaggcacgctgggactgggcaagctgattggtttttacgatcacaacggtatttccatcgacggtgaaacagaaggctggtttaccgacgatacggcaaaacgttttgaagcctatcactggcatgtgatccatgaaatcgacggtcacgatccgcaggcggtgaaggaagcgatccttgaagcgcaaagcgtgaaagataagccgtcgctgattatctgccgtacggtgattggctttggttcgccgaataaagcaggtaaggaagaggcgcacggcgcaccactgggggaagaagaagtggcgctggcacggcaaaaactgggctggcaccatccgccatttgagatccctaaagagatttatcacgcctgggatgcccgtgaaaaaggcgaaaaagcgcagcagagctggaatgagaagtttgccgcctataaaaaggctcatccgcaactggcagaagagtttacccgacggatgagcggtggtttaccgaaggactgggagaaaacgactcagaaatatatcaatgagttacaggcaaatccggcgaaaatcgctacccgtaaggcttcgcaaaatacgcttaacgcttacgggccgatgctgcctgagttgctcggcggttcggcggatctggctcccagcaacctgaccatctggaaaggttctgtttcgctgaaggaagatccagcgggcaactacattcactacggggtgcgtgaatttggcatgaccgctatcgccaacggcatcgcgcaccacggcggctttgtgccgtataccgcgacgttcctgatgtttgttgaatacgcccgtaacgccgcgcggatggcggcactgatgaaagcgcggcagattatggtttatacccacgactcaattggcctgggcgaagatggtccgacgcaccaggctgttgagcaactggccagcctgcgcttaacgccaaatttcagcacctggcgaccgtgcgatcaggtggaagcggcggtgggctggaagctggcggttgagcgccacaacggaccgacggcactgatcctctcaaggcagaatctggcccaggtggaacgtacgccggatcaggttaaagagattgctcgtggcggttatgtgctgaaagacagcggcggtaagccagatattattctgattgccaccggttcagagatggaaattaccctgcaagcggcagagaaattagcaggagaaggtcgcaatgtacgcgtagtttccctgccctcgaccgatattttcgacgcccaggatgaggaatatcgggagtcggtgttgccttctaacgttgcggctcgcgtggcggtggaagcaggtattgccgattactggtacaagtatgttggtctgaaaggggcaattgtcgggatgacgggttacggggaatctgctccggcggataagctgttcccgttctttggctttaccgccgagaatattgtggcaaaagcgcataaggtgctgggagtgaaaggtgcctgatggtgattgccggatgctgattgccggatgcgacgctgacgcgtcttatccggcctacagcgtcttatccggcctacatgtcccgccattttgtttaacgggtgatccacaacgtgggccaggcgtctggcccatgccagttatcgcaggtgggttctgcggcgtaacgcaccaggcgaaaacgctgaccgtcaaagcgccagcgcgcctgaatgccacaatcgcttaatccgcgccctttcgctaaggtcaccagttcacgcgatttctcatcaaatgttgcgttcatcagttccagttcattcgtctcctgaccgttgttgaacggcaaacgcaaccgaaccgggcgcgaagctagtggctttttacgcgacacaatccatgccaaatcaatggtgttataggcccctgcctcacagctaatcatcatcagcgctttatcatcagtcagcgcagtgacattcacctcacgacgcaatggatcaagcgagcagcgcagaccattcatccgccagtttccataatccagcaaatcgttgcgttcttcgagtgagagtggcgtcggcgttgggttaaccaccgcgacctctttcagcgcaggcgcgggcggtacgctgagcggcggttcgtcccctttcttgatccacgcggtttcactgccaacgcgcttttgctgagcatcaataaacaacaacgctgcttttaagccactcagagaaatggtctgatcgccatcgcgtaaggtgattgccttcccttcctgaatcatctgcaaaaacgcggtgatggttgccgtatcatcggttactaataaccatggtgaaatccgccacttgtcaccacttaacgccaacggctcgccatctaacagcagccgtggcgctatctccccttctgacgcctccggcgacttcaatccgccgcgctcaatacgtaaaacggcatcggtatgcgccccggcgctgcggctcagggtcatcaccagtccattatgatcgcccgtattacgcgccacgcagaaattttggttattacaggtgacctgccagtcggaaaacgcccgttgcgctggtgccgcccacaccaaagacgtcggcaacaaagcgaaaaaaaagagaaggaaaatgcgatagcgcatggacggtacgaccccagaagttcaaacaaacagcacaagtcgtatcttcgttgcgcaggtagcgcggctcaatcggatttgtcggattgagccaataataaacaacgaaatattattgttatttttcagtccattaaatgtgacgtttgcaaatagttaagcaataacaccgtcttaccgtcacgtatctcgccggttttgatcatctccagcgcctggctgaacggcagctcgagcacttcaatatcttcatcttcgacaccgccaccggcgttagcgcgctgattgtcactgtattcggcgataaaaaagtggattagctcagtcacaccgcctggcgacatatacagttcaaataatttgcgcacttcacccacttcatagcccgtctcttcaatcgcttctttgcgaatacacacttccggttcgtcgttatccagcagcccggcgcagctttcaatcagctgcccgctttcattgccattaacccaggtagcgacacggaactgacgaatcagaaccacggtctttttcttcgtgttgtacaggaggatcgtcgcaccattgccgcgatcgtacacttcacgtttatggcggataacttcgccgtctttgcgcgtgagatcgtaagtaatgttgtgcagggtgaaatagttatcggagagaattttgtctttaatgagggtgatttgttgcgtcataccgactccacagcgcgaaatgaacaattatcttacgctgtgaagtcgggtttgtctgcgcaggctatcagtgagatttgactgattttacccccagccagtcaataatcccctgtgccgcatgacgtccttctgccattgcggtaaccaccagatccgcaccacgcacggcgtcaccaccagcgaagattttcggattggtggtctggtaacggtactggctttccacatccgcgatgatgcggccccatttgtctaccgttacaccgtgcgactccagccacggcatcccgtgcggattgaagccaaacgccataatcaccgcgtcggctggcatgacaaattcactgccttccaccggcactggacgccgacgcccctgggcatccggctcgccaagacgcgtgcgcaggaaacgaatcccgcagacgtgaccttgttcattcagctcaagcgccaccggctggacgttaaattcgaagttggccccctcttcgcgggcgttcttcacttctttcttcgagcctggcatgttagcttcatcacgacgataagcgcaggtgacgttactcgcgccgtggcgcagtgcggtacgcacacagtccatcgcggtgtcgccgccgcccagtaccacgacgttaagtccggcggtattgataaacggctcttccggtagctcttcgagccccatcacctgtttagtgttggcaatgaggaacggcagcgcgtcataaacgcccggcgcatcttcattgggtaaacccgctttcatggaacggtaagtgcctacgccaacgaagaccgcgtcgtattgttccaaaagcgaatccaaagagacatctttacccacttcacaattgagttcgaagtgaatccccatcgcgctgaagatttcccgacggcgtgccagcagggatttatccagtttgaaagaaggaatgccgaaagtgagcaagccaccgatttctggatggcgatcgtacaccgtcacccccacgccattgcgggtcagaacatccgcacaggccagccctgccggacctgcaccgataatcgccacccgcttgtccactttggtgacatggcttaagtcaggacgccaacctttcgccaacgcctgatctgaaatgtagcgttcaatgttgccgatagttaccgcgccgtgctcatcgcgaatagtacaggcaccttcacacaaacggtcttgcggacaaacgcgtccggtaatttccggcagggtgttggtctggtgagaaagctcgacggcggcgtcgatgtttccggctttcaccagttcaatccactgcggtatatggttatgcagcgggcaggtccattcacaaacgctgtgctcgccgcacttaaggcagcgcgaggcttcccgttgtgcctggtcggcgcgaaatggcagataaatttcatcaaaaccggttttgcgcgcttcaatcgccagtttatccggctcgccacgcgcgggcgttgcctgcatttgttcgactttactcattaccggcatttcttgcgccgcggtactggcatgccacggttgatgttcctgacgcgcggtgcgcaagcggcgggatttcgccatgccggagagtgcgacgtcagtgaccagttgcagcgcgtccgccgggcaattctcaacacaggcaggaccgttttcgcgccccgcacaaaggtcgcatttatgcgccgtggcttttacttttcctgccgcgacgggtgtcaggacgatttgcatcgtaccaaaaggacaggccaccacgcaggatttacagccaatacacttttgctgattgacctgaatgctgtcatcaacgtggctgattgcgccattagggcagctacgggcgcagggcgcatcttcacaatggtgacaggtcactgcactacgttgctgttgatgtttgataaccgtaattcggggatgaaaatggtgttggctcaggacatgttgctcatcattgtgagccatgacacaggcgatttcacaagcatgacaacccagacattgctgactgttggccataataaaacgattcataacgaccttcttttttggttgtaaaaaccttattctttatatgagtgttgttattacccgacttacaggggaatcggcaatgttcatgtgcccagaataagtaactatttcgctataaactgtggcagatcaaataatcccatcactgactaaattgcgtttcagcgaactggaacattaatgattttttgtggagaagacgcgtgtgattgttaaacgacccgtctcggccagtctggcccgggcctttttttacattgtgctgctgtcgattctttccacgggtatcgctctgctaactctggcgagcagtttgcgcgacgctgaggctatcaatattgccggatcgctgcgtatgcagagttaccgcctgggctacgacttgcaaagtggcagtccacaactcaatgcacatcgccagttgtttcagcaggcactgcattcaccggtattaaccaacctcaacgtctggtatgtgccagaagcagtaaaaactcgctatgcgcatctgaatgccaactggctggagatgaataatcggctcagcaagggcgatttgccgtggtatcaggccaatattaataattatgttaatcagatagacctgttcgtactggctttacagcactacgctgaacgcaaaatgctgctggtggtggcgatttccctggctggcggcatcggtattttcacgctggtcttttttactttgcgccgcatacgccatcaggtggttgccccgctgaatcagctggttaccgccagtcagcgtattgaacacgggcagttcgactcgccgccgctggataccaacctgccgaatgagcttggtctgcttgcaaaaacctttaaccagatgtcgagcgagctgcataaattgtaccgttcgctggaagcgtcagtagaagaaaagacccgcgatctccacgaggccaagcgtcgcctggaggtgttgtatcagtgttcgcaggcgctgaacaccagccagattgatgtgcattgtttccgccatattttgcagattgttcgcgacaatgaagcggctgaatatctggagttaaatgtcggtgaaaactggcggattagcgaagggcaaccaaacccggaattgccgatgcagattttaccggtgacaatgcaagagacggtttacggcgaactgcactggcaaaatagtcacgtttcatcatcagaaccgctgcttaacagcgtttcgtcgatgctgggacgcggtttgtactttaatcaggcgcagaagcattttcagcaattattgttgatggaagaacgtgcgaccatcgcccgcgaattgcacgactcgctggctcaggtactttcttacttacgtatccagttgacgttactgaagcgttcgataccggaagataacgccaccgcacaaagtatcatggccgatttttcccaggcgttgaatgatgcttatcggcagttacgcgagctgttgactactttccgcctgacgctgcagcaggcggatctcccctccgcattgagggaaatgctggatacgttacaaaatcaaaccagcgccaaactgaccctcgactgccgtctgccaaccctggcactggatgcgcaaatgcaggtgcatttgttgcaaattattcgcgaagcggtgctgaatgcgatgaagcacgccaacgccagcgaaatcgccgtcagttgcgtcaccgcgccggacggcaatcacacggtttatatccgtgataacgggattggtatcggtgaaccgaaagaacccgaaggtcattatggtctgaatatcatgcgcgaacgcgcggaacggctaggtgggacgctgactttttcacaaccttccggcggcggcacgttagtgagtattagctttcgctctgcggagggtgaggaaagtcagttaatgtaatgcctcctactgaccaaagaatacttgcacttaaggttcagtataaaagggcatgataatttacattaactcctttttttctccacgattggctcgtaccttgccgctacagtgaagcaagtcaagcctacaacgatacgcagaaacacgaggtcctcttttaatggcgaatttctttattgatcgccccatttttgcctgggtgctggcaatcctgttgtgtctgacaggtaccctggcgattttttcattgcccgttgaacaataccccgatctcgcgccaccgaatgtgcgagtgaccgctaactatcccggcgcatcggcccagacgctggaaaacaccgtgacccaggttatcgagcaaaatatgaccggcctcgataatctcatgtatatgtcatctcagagcagtggcaccggtcaggcatctgtcactttaagttttaaagcaggcaccgatccggacgaagccgtgcagcaagtacaaaaccagctgcaatcagccatgcgaaagttaccgcaggcggtgcaaaatcagggcgtgacggtgcgtaaaaccggcgataccaacattctgaccattgccttcgtctctaccgatggttcgatggataaacaggatattgctgattatgttgccagtaatattcaggacccgttaagccgcgtgaatggcgtcggggatatcgatgcctatggttcgcaatattccatgcgtatctggctggacccggcgaaactcaacagtttccagatgacggctaaagatgtcactgatgccattgagtcacagaacgcgcagattgcggttgggcaacttggtggtacaccttccgtcgataagcaggcgctcaacgccaccattaacgcccagtcactgctgcaaacaccagaacagttccgcgatatcaccttgcgggtcaatcaggacggctcagaggtaaggctgggcgatgtcgccaccgtcgaaatgggggcggagaaatacgattatcttagccgcttcaatggtaagccagcctccgggctgggggtaaaactggcctccggcgctaacgaaatggcgacagcggagctggtgctcaatcgtctcgacgagctggcgcagtatttcccgcatggactggaatacaaggtggcgtatgaaaccacctcgtttgttaaagcctccattgaagacgtggtgaaaacgctgctggaagctatcgctctggttttcctcgttatgtatctgttcctgcaaaacttccgcgccacgctgatacccactatcgccgtgccggtggtgttgatgggaaccttctccgtactttacgccttcggttacagcgtcaacaccttaaccatgttcgcgatggtgctggcgatcggtctgctggtggatgacgccatcgtggtggtggaaaacgtcgaacgtattatgagtgaggaaggactcactcctcgcgaagccacacgtaaatcgatggggcagatccagggggcactggtcgggattgcgatggttctttcggcggtatttgtaccaatggccttcttcggcggcaccaccggtgccatctatcgccagttctctattaccattgttgcggcgatggtgctgtcagtactggtagcgatgatcctcactccggctctgtgtgccacactacttaagccactgaaaaaaggtgagcatcatgggcaaaaaggcttttttgcctggtttaaccagatgtttaaccgcaacgccgaacgctacgaaaaaggggtggcgaaaattctccaccgtagcctgcgctggattgtgatttatgtcctgctgcttggcggcatggtgttcctgttcctgcgtttgccgacgtcgttcttaccgctggaagaccgtggcatgtttactacctcggtacagttgcccagcggttcaacgcaacaacagaccctgaaagtcgttgagcaaatcgagaaatactacttcacccatgaaaaagacaacatcatgtcggtgtttgccaccgttggttctggccctgggggtaacgggcaaaacgtggcgcgaatgtttatccgcctgaaagactggagcgaacgcgacagtaagaccggcacctcgtttgccattatcgagcgtgcaacgaaggcgtttaaccaaattaaagaagctcgcgttatcgccagcagcccgccagcaattagcggtcttggtagttctgcaggttttgatatggagttgcaggaccacgctggagcgggtcacgatgcgctgatggcagcacgtaatcagttgctggcgctggcggcggaaaacccggagctaacccgtgtgcgccataacggcctcgacgacagtccgcagttgcagattgatatcgaccagcgtaaagctcaggcgctgggcgttgctatcgacgatattaacgacacactgcaaaccgcctggggttcgagctatgtgaatgactttatggatcgcggtcgcgtgaagaaagtctatgtgcaggcagctgcgccgtatcgcatgctgccagatgacatcaatctctggtatgtccgaaataaagatggcggcatggtgcccttctctgctttcgcgacctcacgctgggaaacaggctcgccgcgtctggaacgctataacggttattctgcggttgagattgttggggaagccgcaccgggggtcagtaccggtacggcgatggatattatggaatcgttagtgaagcagctgccaaacggctttggtctggagtggacggcgatgtcgtatcaggagcggctttccggcgcgcaggctccggcgctgtacgccatttccttgctggtggtattcctgtgtctggctgcgttgtatgaaagctggtcggtgccgttctcggtaatgctggtcgtgccgctgggggtaatcggcgcgctgctggcaacctggatgcgcgggctggaaaacgacgtttacttccaggtgggcctgttaacggtcattggtttatcggcgaaaaacgccatcctgatcgtcgagtttgctaacgagatgaaccaaaaaggccacgacctgtttgaagcgacgctccacgcctgccgtcagcgtttacgcccgattctgatgacctcgctggcatttatcttcggcgtattgccaatggcaaccagcacgggtgccggttccggtggtcagcatgcggtgggtactggcgtaatgggcgggatgatttcggccactattctggctatttacttcgtgccgctgttctttgtgctggtgcgccgccgcttcccgctgaagccgcgcccggaataagcaataaaaaaggcgacatgccaatgtgtcgcctttttcaactttccgattaagaacctgctcagcgggttcttgctgtttgtactttgtctcaggaattacttacgaagcataacttcgataaagtctttccagttccccagttcacgttcaatcataacaacctctcttataattatgggtattctacggaaacaatataccgtggtgaagctaatttactcgattgctgcgatgactacctccgggggacaaatcttatgtaaatactatggtcctgcggtgatgatttgtatgtgatacacagcaacatttcgagatattcatacggcatctaatactgatttaattctggttaaaatacagacagataacaagatgaatattcttaatgtttacgttaaaaatgtttaatattatttaatagttgttaatttgaatacttcgataatgttatatttcctgataatcatttgcaggcaaaatgttttcacccttaaatgagtatttattctcataaatcgaaaaaggattcattatggttacactttacggtatcaaaaattgtgacaccattaaaaaggctcgccgttggctggaagccaataacatcgactatcgttttcatgattaccgcgtcgatgggctggacagcgaattattgaacgattttatcaacgaattaggctgggaagcgttactcaacacccgtggtacaacctggcgtaaactggacgaaaccacccgcaataaaatcaccgatgcggcctctgcggcggcattaatgactgaaatgcctgcaattatcaaacgtccattgctctgcgtgcccggtaagcctatgctgctgggtttcagtgattccagttatcagcaatttttccatgaggtgtagtctatgtcgtgcccggttattgagctgacacaacagcttattcgccgcccttccctgagtcctgatgacgcaggatgccaggctttgttgattgaacgtttgcaggcgatcggttttaccgttgaacgcatggactttgccgatacgcagaatttttgggcatggcgtgggcagggtgaaacgttagcctttgccgggcataccgacgtggtgccgcctggcgacgccgatcgttggatcaatccgccgtttgaaccaaccattcgtgacggcatgttattcgggcgcggtgcggcagatatgaaaggctcgctggcggcgatggtggtagcggcagaacgttttgtcgcacaacatcccaaccatacggggcgactggcatttctgatcacttctgatgaagaagctagtgcccacaacggtacggtaaaagtcgtcgaagcgttaatgtcgcgtaatgagcgtctcgattactgcctggtcggcgaaccgtcgagtatcgaagtggttggtgatgtggtgaaaaatggtcgtcgcggatcgttaacctgcaaccttaccattcatggcgttcaggggcatgtggcctacccgcatctggctgacaatccagtacatcgcgcagcacctttccttaatgaattagtggctattgagtgggatcagggcaatgaatttttcccggcgaccagtatgcagattgctaatattcaggcgggaacgggcagtaacaacgttattccgggtgaactgtttgtgcagtttaacttccgcttcagcaccgaactgactgatgagatgatcaaagcgcaggtgcttgccctgcttgaaaaacatcaactgcgttatacggtggactggtggctttccgggcagccatttttgaccgcgcgcggtaaactggtggatgcggtcgttaacgcggttgagcactataatgaaattaaaccgcagctactgaccacaggcggaacgtccgacgggcgctttattgcccgcatgggggcgcaggtggtggaactcgggccggtcaatgccactattcataaaattaatgaatgtgtgaacgctgccgacctgcagctacttgcccgtatgtatcaacgtatcatggaacagctcgtcgcgtgatgagtggttctgcaagaggaaataagcatggactggctggctaaatattggtggattctggtgattgtctttttggtaggcgtcctgctgaacgtgattaaagatctcaagcgcgtcgaccataagaaatttctcgccaacaagccggagcttcccccgcatcgtgatttcaacgataagtgggacgatgacgacgactggccgaaaaaggatcaaccgaagaagtaagctgagtggccggataaggcgttcacgccacatccggccatgatgcctgatacagtcttatcaggcctacccggctattattacatcatttcaatcacatcatcatcgccaggcttaccgccacttagcgcttcgtcgaaataatgtttcggaatggtataacgcaagtgatccagggcaaattgcatactgcgattgtcgatcgcatggcctaaatcctccacgatatccagcgtcacgtcaccaccggcactgattaacgcttcctgcgccgcaaccgcatgcgccagatcgataaccggatcttcaccgccatgaatcaggtgaattgtcgtggctgtagacgcagtttccggcaggctcgcatagcgtccgttaaaagcaatgacgcgtgaagcaaggcccggttcggctttaatgctctccagcgccataatcgcgccttgagagaaaccgattaacgccgtggcgttagcccctactccgctctgtttctgccagtagcgcaccgtctcaataaacgtcggcatgatggcatccacacgcgcctggcgattatcttccgtaataccctgcactgaaaaccactgacgccccgccggattaccgctcggctccgcgccaccgacactcaccaccagcgcatcaggaaacagcggtgcaaaccagctacctatttcccccattgccaccgggttatccccgacaccgtggaaaagcagtaacaactgttgcgcaggtttatccgggctttgaacaacaaaatggtcatgtttcatggcgaactccttaactgatgtcattaattttacgccgctgactcacaatgaccatgggagaaaattgaaggagtcagtgaaaaaattgccattgcgttatgcgatcgcgcagacgctcagtgcgaacatcattaagtgcgaacagcgcctgcgcggcctcttcccgctgacggaccagtaacatcttgcggcctgaaagtttaagtgtggtacataactgcgcgtcgctgacgtttttctgtaaacgcccacgcagcgccggtaatgccagttcactggtttgtagcagacgcaataagcaacctaacgatgttaatagcggacgatgagcgaaagcaaaaccggccagttcaagccagtcgtcgtcagaaaggacggcatcgtttagtggatcaacaggaagcgtttcgccattccactttgcgagagcttgcgcatcgcgacgtaaacggtaatgctcacgttcagccagttgtttacccgcattactcatcggtaacagcgccatcgccgtatagcaaccgctgctggcttcacgatgattacccatccgcaccagcacaaaaccgcagcggtgccagaaacgccataactccccggtgtaaccaaaactcaccgaaagatagtcgaggtcacgcgtatattgcaaagcaccagcaataagttgctgccctgtgccttcccgctgacgcgccggatgaactgctatccggctgacccgccgtccacgcaatgtcgctgccagtggattgctaccgtgcgccgccagcgactgggccaccagattaccccgcgggcgacgaaaacctgcccataccgcctgactgagttgttgagataatcccccctcatccaccagccacagcgctccggcaatctcgttttcgccagccgcctgtaaaaaatgttgccctggtgcatccatcatccggcgtaaatccagcggcgaagtccggtagtgcgcaccagacaataactgataaacctttaacggcgtttctggctcgcttcgccataacgtttgttcaaatgcggaaatgacgatattgccttgtggtgtatgggtgaagttttcatcgtcaaaaaccagtgcctcactaaccattttttccagcgggcatccctgtgcccagcggatcggctgttgcagttcaaaacggtgtaaatgcggaaagcgagcgcaaaatttcagcaaaaaaccacgtccggtgccttcgtagccctgcaccgtagtggttaacaacgttcgaggaaaacgcgataccagttgatgcaacaacggcgcaggtatggctgcggcttcgtcgaccaccagccagtcggcttgctcatcgctggctaacaaggcatccggtgcaataaagcgaaacttctcgcccgcaaattgtgccagtacatccgttgccgcttttgcgggcgcggtgacaatcgcactgcccgcaatacgagaaatgagttgccctgccaacgccgacttaccgcgcccacgcgcagccgttaccgctgccacgcccggaggcatggtcagtagctgctgtaagagttgctgttgttctggttgtggtgcgccggtcgcggggtgccagtcagtacggggagtaaaatgcgccaacgagaacggctggttttgccgccagaggatagcgtcgttatccgccgtaagtacgcgtttgagatgctggacaaaatgcggcgtcgcaatagggtcagggcaatcactccagcgcagcgagtcggcatcaggttggttttcccactcttcccatacagggagtaacaaaaccagccagcttcccgctttcaacgttccgctaagtgctgcaaaggcagcggcatcaaagccgtggcgggcgtcgaataccgcatgccggaactcgcgcccaagtaaagtttgtagcgccgagggtgaacagtggttttcagcatctggctgcggcgaaatccacagccagtcgccaggtaaggcatcacgcaacttaagcgcatgatcaaaacaccaaccctcttccccgctcaacaccagcaagcggcggatcccttcacgtttcatttgcgctgttaatgtgtgaagcgcagtcagttcagccatccctgccccggaagttaaatgcttttaccaaaagtattgcattgtgccggatcgccgctgtcgaaaccacgtttaaaccagctgtagcgttgctgagaagtgccatgtgtgaaactatctggtactactcgcccctgactttgctgttgtaaacggtcatcgccgatggcctgcgccgcgttcagcgcctcttccagatcgccggtttccagaacgccttgctgctgcatactatgcccccagacaccggcaaaacagtcggcctggagttccatacgcacagataagcggttcacttccgcctgcgtcgcgttttgttgcagttgacgaactttcggctcgatgcctaacagtttctgcacatgatgaccgacttcatgggcgataacgtacccctgggcaaaatcgccatccgcgccaagtttgtctttcatgtcatcatagaaggagagatcgatataaactgtgccatccgccgggcaatagaacggccccataatggactgaccagccccgcagccggtgcgcgtcattccacggtacatgaccagcttcggttgctgataggtcttacccatcttctcgaactgttgtccccaggtgtcttccgtggttgccagaatcaccgaggtgaattttgcagcttcgtcttcattagggctaatggaccgcgttgattgttgttgggaaaccggctgtccagtcattaacccggttaaatcaacaccatagtagcctgcaaccagcacgactaacagtaaaatcagcccgcctttaccgcttggcaggagaaaaccgggaccgcccatagacggaccaccggagctgttgcgcctgtcttcaacattgtcactttcacgtcgcccttgccaacgcatagatacctcaacaatatattcattatagaaatgatcgtaggtggttcagaggaagattaccacaggaaagcgggatgaaatggcggaggaatgagcgttcaatgcatatattccgagagcggttgtcttgccgtgccagctgcacggcaagatgatgaacagaaaaatcagtccagctgtacacccaggcggcgggcgacggcttcataggcctcgatcaggccaccgaggctctggcggaaacggtctttgtccattttctccagcgtttctttgtcccacaggcggctgccgtccggggaaaactcatcgcccagtaccacttcacctttgtacagaccaaactccagcttgaagtcgaccagaatcagaccagcatcatcgaacagttttttcagcacgtcgttcgctttgtaggtcagctctttcatacgcgccaggttctctttgctcacccagccaaaggtttcgcagtaagattcgttgaccatcggatcgtgcatggcgtcgtttttcaggaacagatcgaacagcggcgggttcagctcaataccttcttcgattccaagacgtttcaccagagagccagcagcacggttacgcacgacacactcaaccggcaccatatccagctttttcaccagacattcggtatcggagagcagacgctccatttgagtcgggatacccgcttcagccagtttgctcataatgaagtagttgaacttgttgttcaccatacctttgcgatcaaactgctcaatgcgcgcgccatcccctgctgacgtatcattgcggaattcgagcaccaacaggtccgggttttccgtgctgtatacggttttcgctttaccacgatacaactcagcttgcttttgcatctttatcactcctgggtgtgaattaacgttttaaaatcttttgctgtctggtgtgccggatgttttgtcggatgcggcgtgaacgccttatccgaactacgtccgacaaacaaatttcgtgcgaattaccgctaaaatcgcgttttcctgcagacgcacacgtttgcgtatcatatcagaaaaaagggccggatgattccagccctgtatttttacttgctaaacgcagcctggaagacagctaccagcgcgtcgttctgactctgagtcagagtatgacctttcggatcgatgaactgtaggctgctgcggttatctaaatcgccaacctgcagtttatagtcaccggatgccaggcctggatcgctcgcgcccagttcctgccagtcgctgtcagacagcggcttataagttacggccatgttgccctgcgaacgggtgctgtcggtcactttcatgcccactttttccagcgccgctggcagacgttgccaaaccacattgaacggcccgcgtacgaccagcattggtaaaccggtgtcatcagctgcactttgtacgtccatagtggtggaggcacgattttgcgcagcgttcgcggcgtcagtggcagatttatccagaccggcggaaataacgttcatcatctccgtgctgtaacgctgcatggaagccgcgtctgcaaccggtttgcccgcctgttccaggttcagcagtttaaccgtaaccgcctgctgataaccctgcggcttaacagagatttgataacgaccacgatactgctcgtcttcgtccagacggttccattgtacccaatcggtggtcagtgtctgaccagcatcatcacgttgggtgatggtgtagtttttcgcctgcagcacgctaaccacctgcggccacagagtattgccacgaccattttccaccagcaatgaagcggtatcgcccgtgaactgggtacgcgcgccagaaaccagtgccagcggctgggctggtggacgaatgtccagcgccttaccgacagcaccactaccgttggtcaccgggattgcataatcaccggaggtcaccggcaaaatcattccagccggggcatgaagctccgcaagcggtgccgcttccaggtaggcttcatcaccactgacctgacgcttatagcgtgagtcagaactacaggcagcgagtaataaaacaagcgaaacacccgcaacctttgccaggcgcgacttttgaacagagtaagccatcaaatctccctaaactttacagcaaaccggcatgcttaagcgccgctctgaccgtctcacgaccactgtcggtgattggtgtcattggcaggcgcagcgtatcggtcgccacaagacccagttccttacatgcccatttcaccgggattggattgggttcgacaaatagtttgttgtgtaatggcatcagacgctgattaataacgcgtgcctcggcaaaatgcccttctgctgccagtttgcacatctgggccatatcacgcgctgcgacgttagccgtaacggaaataaccccatgaccgcccaattgcatgaagtccagcgcgctcgcatcatcgccgctcagcagaacaaaatcatctgaaaccagctctttgatctggtttacacgcgttaagttccctgttgcctctttgattccgataatattttttactttcgccagacggcccaccgtttccgggagcagatcgcagccagtacgggacggcacattatacagaatttgcggcaggtcagtatgctcagcgatggctttgaaatgctgatacaaaccttcttgcgacggacgattgtagtaaggggttaccgtcaggcagccgacgataccactgtcattgaagcgctgcgtcaggctaatggcttccgcagtagcgttagcgccggtcccggcaattaccggaatgcgcccatcagccagctccagcgtcatcatcaccacatcagcatgttcgtcatgatttaaggtagcggactcgccagtggtgccaacagaaacgatcgccgaagtaccgctggcgacatgataatcaatcagttttttcaagctagcccgacagacattacctttttcatccatcggagtaacaatcgcgacaatacttcccgtgaacatgggccatcctctgtgcaaacaagtgtctcaatggtacgtttggtatggcattaaaagcaagcagacagaaccgttctgattgttgtatgcatgttttttttatgctttccttaagaacaactcaccccttaaaggaataaccagtttgacactgtcatcgcaacattatctggtgatcactgcgttgggtgccgatcgccctggaattgtgaacaccatcacccgtcatgtcagtagttgcggctgtaatattgaagacagtcgcctggcgatgctgggagaagagttcacgtttattatgctgctttccggttcatggaatgccattactctgattgaatcaacgttaccgttgaaaggtgccgaactggatcttttaatcgtgatgaagcgcacgacggcgcgtccgcgtccgccaatgccagcatctgtctgggttcaggtcgatgtggcagactccccgcatttaattgaacgcttcacagcacttttcgacgcgcatcatatgaacattgcggagctggtgtcgcgcacgcaacctgctgaaaatgaacgggctgcgcagttgcatattcagataaccgcccacagccccgcatctgcggacgcagcaaatattgagcaagcgttcaaagccctatgtacagaactcaatgcacaaggcagtattaacgtcgtcaattattcccaacatgatgaacaggatggagttaagtaatgaatccactgaaagccggtgatatcgcaccgaaatttagcttgccggatcaagacggagaacaagttaatttgaccgacttccagggacagcgtgttctggtttatttctacccgaaagccatgacccccggctgtaccgtacaggcctgcggcttacgcgataacatggatgagttgaaaaaagcgggcgttgatgtgctgggtatcagcaccgataaacccgaaaaactctcccgttttgcggaaaaagagctgcttaactttacgctcctgtctgatgaggaccaccaggtgtgcgaacaattcggcgtctggggtgaaaagtccttcatgggcaaaacctacgatggcattcatcgcatcagcttcctgattgacgctgatggcaaaatcgaacatgtctttgacgatttcaaaaccagcaatcaccacgacgttgtgctgaactggctgaaagaacacgcctgattactttgctccattccgtgctggctgcgcttgcggccagcatacctcacttctcgtgatgaagatcacattctcgctttcccctgcgacacgggtgtcgaatccattttttgctgaacgttaatgaccatcatttttgtaccgttcagaatccagttaatacataacttattgaatatattgagttaatcagaatggcatcctttatgcaatatgaaatgcaatgtttcatatcattttcaaggagccgacatgaaccgctttgtggtggccgaaccactgtggtgtacaggatgtaatacctgtctcgctgcctgttcggacgtgcataaaacgcaaggtttacagcaacacccgcgcctggccctggcgaagacgtcaacaatcactgcccctgtcgtgtgtcatcactgtgaggaagccccttgcctgcaggtctgcccggtcaatgccatctctcagagggatgatgcgatccaactcaacgaaagcctctgtattggctgcaagctttgcgccgtggtctgcccatttggcgcaatcagcgcttcaggaagccgtccggtgaatgcccatgcgcaatatgtttttcaggctgaaggctcactcaaaaacggcgaagaaaacgtgctgccccaacatgcgttgctgcgctgggaacctggtgtccagaccgtcgcggtgaaatgcgacctgtgtgatttcttgccagaaggtccggcctgcgttcgcgcttgcccgaatcaggcgttacggctgatcaccgacgatagcctgcaacgtcagatgaaagaaaaacagcgccttgccgcaagctggtttgccaatggcggggaggatcccctttccctcactcaggagcaacgctaatggatgccctgcaattattaacctggtcgctgatcctctatctgtttgccagtctggcttcgctgtttttactcggtctggacagactggctattaagctttccggcatcacatcgctggtgggcggcgtgattggcatcatcagcggaattacgcaattacatgctggtgtaactttagtcgcccattttgccaccccttttgactttgccgatttaaccctgcgaatggatagcctctcggcatttatggtgctggttatctccttgctggtggtggtttgttcgctctattcattgacttatatgcgcgaatacgagggcaaaggcgcggcggcgatgggcttctttatgaatcttttcatcgcatcgatggttgccctgctggtgatggacaacgctttttggttcatcgtgctgtttgaaatgatgtcgctgtcttcctggtttctggtcattgccaggcaggataaaacgtcgatcaacgctggcatgctctacttttttatcgcccacgccggatcggtgctgattatgatcgccttcttgctgatggggcgcgaaagcggcagcctcgattttgccagtttcgcacgctttcactttctccggggctggcgtcggcggtgtttctgctggcctttttcggttttggcgcgaaagccgggatgataccgttgcacagctggttgccgcgcgctcaccctgccgcaccatcgcacgcttcggcgttgatgtctggcgtaatggtcaaaataggtattttcggcatcctgaaagtagcgatggatctgctggcgcaaacgggtttgcctctgtggtggggcattctggtgatggcgatcggcgcaatctccgcgctcctgggcgtgctatatgcgctggcggaacaggatatcaaacggctgctggcctggagtaccgtcgaaaacgtcggcattattttgctggcagtcggtgtggcgatggtcggtctgtcactgcacgacccgctgctcaccgtggttggactgctcggcgcactgtttcatctgctcaaccatgcgctgttcaaagggctgctatttctcggcgcgggagcgattatttcgcgtttgcatacccacgacatggaaaaaatgggggcactagcgaaacggatgccgtggacagccgcagcatgcctgattggttgcctcgcgatatcagccattcctccgctgaatggttttatcagcgaatggtacacctggcagtcgctgttctcactaagtcgtgtggaagccgtagcgctacaacttgcgggtcctattgctatggtaatgctggcagtcactggtgggctggcagtaatgtgcttcgtaaaaatgtacggtattactttctgtggtgcgccgcgcagtacacacgctgaagaggcacaggaagtgccaaatacgatgatcgtcgccatgctactgctcgcggcactctgcgtattaattgcgcttagtgccagttggctggcaccgaagataatgcatattgcccatgcgtttaccaatacccctcccgccactgtcgccagcggaatagcacttgtacccggcacgtttcatacacaggtcaccccctcattactgttgctgttactactggcgatgcctttgctgcctggcctttactggctgtggtgtcgttcgcgccgcgcagcgtttcgtcgcacaggagatgcctgggcatgcggctacggctgggaaaatgcgatggccccgtcaggcaatggcgtgatgcagccgctgcgtgtggtcttttctgcgctatttcgtctacgacaacagctcgaccctacgctgaggctaaataaaggtcttgcgcacgtcaccgccagggctcagagcacagaacccttctgggatgagcgggtgatccgccccatcgtgagcgccacccaacggctggccaaagaaatacagcatctgcaaagcggcgactttcgtctctattgcctgtatgtggtcgccgcactggttgtgctgctaatcgctattgccgtctaaggaaatcaccatgagacaaactctttgcgacggatatctggtcatttttgcgttagcacaggccgtgattctgctgatgctaaccccactttttacgggtatttcccggcagatacgcgcgcgtatgcactcccgccgcgggccggggatctggcaggattatcgcgatatccacaaactgtttaaacgccaggaagttgcgccgacatcttcaggtctgatgttccgcctgatgccgtgggtattaatcagcagcatgctggtgctggcgatggccttaccactgtttattaccgtttccccttttgcgggcggcggcgatctgatcacccttatctatcttcttgccctgtttcgttttttctttgctctttccgggctggataccggaagtccgtttgcgggagtcggtgccagtcgcgagttgacgctcggcattctggtcgaaccaatgcttattctctcactgctggtattggcgctgatagcaggttccacgcatatcgagatgatcagcaatacgctggcgatgggctggaactcgccgctaaccaccgtactggcgttactggcctgtggttttgcctgcttcattgagatgggaaaaattccctttgatgttgctgaagcagaacaggaattacaggaaggcccgctgaccgaatattccggtgccgggctggcgctagcgaaatgggggctggggctgaaacaggtcgtgatggcagcactgtttgtggccctgtttctgccctttgggcgcgcgcaagaactttctctcgcctgcctgctgacttcacttgtcgttacgctgctcaaggttttgctgatttttgtactggcctcaatcgcagaaaacacgctggcacgcgggcgttttttactcattcaccatgtgacctggcttggcttcagccttgctgcgcttgcatgggtcttctggttaaccggtctgtaaggagcactgacggaatatggaaaatcttgctctgacgacgttattgctgccttttatcggcgcactggtcgtttcgttttcgccacaacgtcgggccgccgaatggggggttttgttcgccgcgctgaccacgctgtgcatgttgtcactgatctccgcgttttatcaggccgataaagttgccgtcacgttgacgttggtcaacgtgggggatgtggcgttgtttggcctggtcattgatcgcgtgagtacgctgattctgtttgtggtggtgtttctcggtttgctggtcacgatctactccacgggttatctgacggataaaaatcgcgaacacccgcataacggcacgaatcgttattacgcatttttactggtgtttatcggcgcgatggcgggactggtactctcctcgacgctgctcggtcagttgttgttttttgaaattacaggcggctgctcctgggcgttgatcagttattaccagagcgataaagcgcagcgttcagcactaaaagcgttacttatcactcatatcggctcgttggggttgtatcttgccgccgccacgctgtttttgcagaccggaacgtttgcgcttagcgcgatgagcgagttacacggcgacgcacgttatctggtttatggcggcatcctgtttgccgcgtgggggaaatcggcccagctaccgatgcaagcgtggctaccggacgcaatggaagcgccaacaccgatcagcgcctatctccacgccgcatcgatggtgaaagtgggcgtttacatttttgcccgcgctattatcgacggcggcaatatcccgcatgtgattggcggcgttggcatggtcatggcactggtcaccattctttatggctttctgatgtatttgccacagcaggatatgaagcggttgctagcctggtcgaccatcactcaacttggctggatgttcttcggcttgtcgctctccatcttcggctcgcggctggcgctggagggcagcatcgcctacatcgtcaaccacgcgttcgctaaaagcctgtttttccttgtagcaggtgcgctgagttacagctgcggcacgcgcttgttgccgcgtctgcgtggcgtattgcacaccctgccgttgccaggcgtgggtttctgcgtggcagcgctggcgattaccggcgtgccgccgttcaacggcttcttcagtaaattcccgctgtttgctgccggttttgcgttgtcagtggagtactggatcctgctgcccgccatgattcttctgatgattgaatcggtcgccagtttcgcctggtttattcgctggtttggtcgcgttgtgcctggcaaaccgagcgaggccgtcgccgatgccgcaccgctgccaggatcaatgcgcctggtgttgattgtactgattgtgatgtcgctgatttccagcgtaatcgccgcgacctggttgcagtaaggagatgatgaatgaccggttctatgatcgtaaataatctggcgggactgatgatgctgacatcgctgtttgtgattagcgtcaaaagctatcgcctgtcatgcggattttacgcctgccagtcactggtgctggtgtctattttcgccactctctcgtgcctgttcgccgcagagcaactgctgatctggtccgccagcgcctttatcaccaaagtgctgctggtaccgttaatcatgacttacgctgcacgaaatattccccagaacatcccggaaaaagcgttattcggtccggcaatgatggcactgctcgcggcgttaattgtcctgctttgcgcatttgtcgttcagcccgtgaagctaccgatggctaccgggctgaaaccggcgctggcggtagcgttaggtcattttctgcttggcctgctgtgcattgtcagccagcgcaatatcctgcggcaaatttttggttactgcctgatggaaaacggctcccatctggtgctggcgcttcttgcctggcgagcaccggaactggtggaaataggtatcgctaccgacgccatcttcgccgtcattgtgatggtgttactggcaagaaaaatatggcgtacccacggcacgctggacgtgaacaacttgaccgcgctgaagggataatgagatgagttattctgtgatgttcgctttactcctgctcacgccgctgcttttttcgctgctctgttttgcctgccggaaacggagactttctgcgactcgcacggtgaccgtattacatagcttagggatcacactgctgctgattctggcactctgggtggtccaaactgccgctgatgcaggagaaatattcgctgcgggactgtggcttcatattgatggtctgggcggtttgttcctcgccattcttggtgtgattggctttctcaccggtatttactcgattggctacatgcgtcatgaagtggcacacggcgagctttcacccgttacgctgtgcgattactacggtttcttccatctgtttttgttcaccatgctgctggttgttaccagcaataacctgattgtgatgtgggcggcgatcgaagccaccaccttaagctcggcgtttctggtaggcatttacggtcagcgttcatcgctggaagctgcatggaagtacatcattatttgtactgttggtgtcgcttttggtctgttcggtaccgtgctggtatacgccaacgccgccagcgttatgccgcaggcagaaatggcgatattctggagcgaggttcttaagcaatcgtccttgcttgacccaacattaatgctgttggcctttgtgtttttgctaattggctttggtaccaaaaccgggctatttcccatgcacgcctggctgccggatgctcacagtgaagcgccgagtccggtcagcgccctgctctccgccgtattgctgaactgcgcgctgttggtgctgattcgctattacatcattatttgccaagccatcggcagcgatttccccaaccggttgttgctcatcttcggcatgttgtcggttgccgtggcggcatttttcattctggtacagcgggacattaagcgtctgctggcgtactccagcgtggagaacatggggctggtcgcggtggagctaggcattggcgggccgctgggaatttttgccgcgctgctgcacatcttaaaccacagtctggcaaaaacgctgctgttctgcggttccggcaatgtactgctcaagtacggcacgcgcgatctcaacgtcgtctgtgggatgctcaaaatcatgccatttaccgccgtgctgtttggcggcggtgcgctggcgctggcagggatgccgcccttcaacatttttcttagcgaatttatgaccattaccgccggactggcacgtaatcacctgctgattatcgtcctgctgttattgctgttaacgctggtgctggcgggcctggtacggatggctgcgcgggtgttaatggcgaaaccgccgcaggccgttaaccggggtgatctcggctggttgaccacctcgccaatggtgattctgctggtcatgatgctggcgatgggaacgcatattccacaacctgtcatcaggatcctggcgggcgcttccactatagtcctctcagggacgcacgatctgcctgcacaacgtagcacctggcatgattttttgccttcaggcaccgcatctgtttcggagaaacacagtgaacgttaattcatcgtcaaatcgtggcgaagcgattctcgccgccctgaaaacgcagttccccggcgcggtgctggatgaagagcgacaaacgcctgaacaggtcaccattacggtgaaaatcaatctgctgcctgacgttgtacagtatctttattatcaacatgatggctggcttccggtcctgtttggcaacgacgagcggacacttaacggtcattacgcggtttattatgccctttcaatggaaggggccgaaaaatgctggattgtggtgaaggcgctggtcgatgccgacagtcgggagtttccgtcagtcacaccgcgcgtccctgccgcggtctggggcgagcgagaaattcgcgatatgtacgggctgattccggttggcctgccggatcagcgtcgcctggtgttgcccgatgactggccggaagatatgcatccgctgcgcaaagatgcgatggattatcgactgcgccctgaaccgacgactgattccgaaacgtatccgtttatcaatgagggcaacagcgatgcgcgggtgatccctgtcggcccgctgcatatcacctccgatgaaccgggtcacttccgcttgtttgtggatggcgagcaaattgtcgatgctgattaccgcctgttttatgtccatcgcggcatggagaaactggcagaaacgcggatgggctacaacgaagtgaccttcttatcggaccgcgtgtgtgggatttgcggttttgcccacagtgtggcctataccaattcggttgaaaatgcactggggattgaggtgccgcaacgagcacatactattcgctcgattctgctggaagtcgaacggctacacagtcatttgcttaaccttggcctctcctgccatttcgttggttttgataccggctttatgcaatttttccgcgtgcgggaaaagtcgatgacgatggcggaattgctgatcgggtcgcgtaaaacctacggtctgaatctgattggtggtgttcgccgcgatattctcaaagagcaacgtctgcaaacgctgaaactggtgcgcgagatgcgcgccgacgtgtcggagctggtagagatgctgcttgctacgccgaatatggaacaacgcactcagggcattggcattctcgaccgacaaatcgcccgtgaatatagccctgtagggccgctgatccgcggcagtggttttgcccgtgatttgcgctttgatcacccctacgccgactacggcaatattccaaaaacactgtttacctttaccggcggcgatgttttctcccgcgtgatggtccgtgtcaaagagacgtttgattcgctggcaatgctggaatttgccctcgacaacatgccggataccccactgctgaccgaaggctttagctataaacctcacgcattcgcgctgggctttgttgaagcgccacgcggtgaagacgtgcactggagcatgctcggtgataaccaaaaattgttccgctggcgctgccgtgccgccgcctacgccaactggccggtgttgcgttacatgctgcgcggcaataccgtttctgacgcaccgctgattatcggtagccttgatccctgctactcctgtaccgaccgtgtgacgctggtagatgtgcgcaagcgccagtcaaaaaccgtgccgtataaagagatcgaacgctacggcattgatcgtaaccgttcgccgctgaagtaaggacagaagatgctgaagttactgaaaactattatgcgcgccggaaccgcgacggtgaaatatcccttcgcgccactggaggtcagccctggctttcgcggaaaaccggacctgatgcccagccaatgtattgcctgcggtgcctgcgcctgtgcttgtccggcaaatgcgctgactatccagaccgacgaccagcaaaattcgcgcacctggcagctctatctggggcgttgtatttactgcggacgttgtgaagaagtgtgcccgaccagagccatccagcttaccaataactttgaactgaccgtcaccaataaagccgatctctatacccgcgcgacgttccatctacaacgttgcagccgttgcgaacgcccgtttgccccgcaaaaaaccatcgcactggctgctgaattgttagcacagcaacaaaatgcgccacaaaaccgcgaaatgttgtgggcgcaagcgagcgtctgcccggaatgcaaacaacgcgcgacgctgatcaacgacgatacagatgtactgctggtggctaaggagcagctatgagtccagtgcttacacaacatgtcagccagcccatcacgctggacgagcaaacgcaaaagatgaagcggcatttgctacaggatatccgtcgctcggcttacgtttatcgcgtcgattgcggcggctgcaacgcctgtgaaatcgaaatttttgctgccattacaccagtattcgacgcagaacgttttggcattaaggttgtttcatcaccgcgtcacgccgatattttgttatttactggcgcagtcacccgggcgatgcgtatgcctgcacttcgggcgtatgagtctgcccccgatcataaaatttgtgtttcctacggcgcgtgcggtgtcggcggcggtattttccacgatctctacagcgtctggggcggtagcgacaccattgtccccattgatgtttggatccccggctgcccgccaacaccggccgccaccattcacggtttcgccgtggcgctcggtttgctgcaacagaagattcacgctgtggattatcgcgatcccaccggggtgactatgcaaccgttgtggccgcagatcccgccatcacagcgtatcgccattgagcgagaagcgcggcggctggcgggctatcgtcaggggcgagaaatttgcgatcggctcctgcgccatttaagcgacgatcctacaggaaatcgggttaacacctggttgcgcgatgccgacgatccacgtctcaatagtatcgttcagcaactctttcgcgtactccgggggttacatgactgaagagtgcggggaaattgttttctggacgctgcgaaaaaagtttgtcgccagtagcgacgagatgccggaacacagctctcaggtaatgtattactcgctagctatcggccatcacgttggcgtgattgattgtctgaatgtcgccttccgctgcccactgacggaatacgaagattggcttgcactggtcgaagaggagcaagcccgacgtaagatgctgggggtgatgacttttggtgagattgttattgacgccagccacaccgccctgttgacccgggcattcgcgccactggcggatgacgcgacgtctgtgtggcaggcgcgtagcattcaattcattcatctgttggatgaaattgtgcaggaaccggccatctatctgatggccagaaaaattacgtgagaaggatttctcattaataaggactgttgatggctatgtcagacgaggcgatgtttgccccgccgcaaggaataacaattgaagcggtaaacggaatgctcgcggagcggttagcgcagaaacacggtaaggcgtctttattacgcgccttcatcccgctgccgccgccgttcagcccggtacaacttattgaactgcatgttctcaaaagcaacttctattaccgctaccatgatgatggcagcgatgtgacggcaacaacagagtatcagggcgagatggtcgattattcgcgtcacgccgtccttctcggcagtagtggaatggcggagctacgctttattcgcacccacggcagtcgttttactccccaggattgcacactgtttaactggctggcgcggataatcaccccggttctgcaatcatggctcaatgatgaagaacagcaggtggcgctgcgtttgctggagaaagatcgcgatcatcatcgggtactggttgatattactaatgcagtgctgtcacatcttgatctcgacgatctgatcgctgacgtcgctcgtgagatccatcattttttcggtctggcttcagtcagtatggtactgggcgatcatcgaaagaacgagaagtttagcctgtggtgcagcgatctttctgcctcacattgtgcgtgtctgccacgcaatatgcctggcgacagtgtattgctgacacaaacgctacaaacccgacaaccgaccttgacgcaccgtgcagacgatctgtttctctggcaacgcgacccgttattactcttacttgcatctaacggctgcgaatctgcgctccttataccgcttacctttggcaaccatacaccgggtgcattgttgctggcgcatacctcttccactctctttagtgaggaaaactgccagctactacaacacatagccgatcgcatcgctattgccgttggcaatgccgatgcctggcgtagcatgaccgatttgcaggaaagtttgcagcaagaaaaccaccagcttagcgagcagctcctttcgaatctgggcatcggtgacattatctatcaaagccaggcaatggaagacctactccagcaggtagatattgtggcgaagagcgacagtacggtgttgatttgcggtgaaaccggaaccggcaaagaggtgatcgccagagcgatccatcaacttagcccgcgacgcgacaagccgctggtcaaaatcaactgcgctgccatccccgccagtcttctggaaagtgagttattcggtcatgacaaaggggcgtttactggtgcgattaatacccatcgtggtcgttttgaaattgccgatggcggcacgttgtttctcgatgaaattggcgatctgccgttagaacttcagcctaaactgctgcgcgtattgcaggaacgggagattgagcgtctcggcgggagtagaacgatcccggtaaatgtcagagtcattgccgccaccaaccgtgatttgtggcaaatggttgaagatcgccagtttcgcagcgatctcttttatcgcctgaatgtcttcccactggaattgccgccgctgcgcgaccgtccggaagatatccctcttttagcaaagcatttcacgcaaaaaatggcgcgccatatgaatcgcgcaattgacgccatcccgaccgaggcactacgccagttgatgtcgtgggattggccgggcaacgtgcgcgagctggaaaacgtgattgagcgggcggtactgttgactcgtggtaacagtctgaatttacatctaaatgtccgacaaagccgtttactgccgacgctaaatgaagattcagcgcttcgcagttcaatggcgcagttgctgcacccgacgacgccagagaatgacgaagaagaacgtcagcgcattgttcaggtattgcgagaaaccaatggcattgttgccgggccccgtggcgcggcgacacgattagggatgaagcgcaccacgctgctgtcacgaatgcagcgtctggggatctcggttcgcgaggtgttgtaatctgcttttgcaggagtatgcatgagaaacaaactctctttcgacttgcagttgagcgccagaaaagcggcaatcgctgaacggattgccgcccataaaattgcccgcagtaaagtgtcggtctttttaatggcgatgtccgctggcgtgtttatggcgatcggatttactttttacctttccgttatcgccgatgccccgtcttcacaggcattaacccatctggtgggcggcctttgctttacactcggctttattttgctggcggtttgcggcaccagcctgttcacctcgtcggtaatgacggtgatggcaaaaagtcggggcgttattagttggcgaacttggctgattaacgcacttctggtggcctgcggtaatctggcaggtattgcctgtttcagtttgttaatctggttttccgggctggtgatgagtgaaaacgcgatgtggggagtcgcggttttacactgcgccgagggcaaaatgcatcatacatttactgaatctgtcagcctcggcattatgtgcaatctgatggtttgcctggcgctttggatgagttattgcgggcgttcgttatgcgacaaaatcgtcgccatgattttgcccatcaccctgtttgtcgccagtggctttgagcactgtatcgccaatttgtttgtgattccgttcgccattgccattcgccatttcgcccctccccccttctggcaactggcgcacagtagcgcagacaattttccggcactgacggtaagccattttattaccgccaatctgctcccggtgatgctgggtaatattatcggcggtgcagtgctggtgagtatgtgttatcgggctatctatttacgtcaggaatcctgaaaaatcagcccggcgaaacagttcgtcgggctgaagattattcttgcgctatttgcccatcgggccaggcgtggatcacggctttgatcagggtcgccaatggaatggcgaagaatacgccccagaatccccacaaaccaccgaagatcaccaccgataaaataatcaccagcggatgcaggttaaccgcttcggagaacaacaccggtactaacaggttgccgtccagcgcctgaataatcagatacactgcgaagcagctccagaattccgtgcctgcaccaaactggaatagcgccacgccaaccaccggaatggtcaccacaaatgcgccaatgtacggaataagtaccgagaagccgaccagcaccgccagcagcagcgaatagttcagcccaaagagcaagaaccccagccaggtggcgatccccaccacgatcatctccagcactttgccgcggatatagttggtgatttgttgattcatctccttccacacctgtcctgccagtccacggttgcgcggcagcacccgacgaacggcgttcagcatctgctctttgtctttcagcaggaagaagaccatcaatggcaccagcaccagatagacggctatggtcagcaaaccgaccagcgaggcgagggaaattttcaccaccgaatcgcccatggtcagcatccgactgcgcatattttcggccattgcatcaataatgcccgcatccattaacgccggatagcggcgcggcaacgtggcggcaaagtcagaaagcttattgagcatccccggcatatcgcgaattaagtagatgccctgttgccaggcgataggcagtaccacgaacgccatcagtagcaatataccgacaaaaaccaccaatacaatcgacgtcgcccagcggcgggagcagccaatagattgcaggcgcacagttggccattccagcaaataggccagcacaatagccaccagcaacggagcaagcaggccactaaagaaaaagataatgccaaatccggcaactaaaataaccagcaaggcaatcgcttccgggtcgctaaaacggcggcgataccattgcatcaacatttcgagcataaagaccttccctgaacctcaagagcgggattgcgatccgcaattgtatcgaaatgtcacaaaaaagacttcgctttttatgacggattcaggaaactgaaaagtcatttgagtgggctaatcttcgccgttacactcaaatgcggcgcggtgggaacgatatttcacagtatcggtcaaatgactatcttcagaaatacaggatagaggttatgttcaggcagttgaaaaaaaacctggttgcaaccctcattgctgctatgaccattggtcaggtagccccggcgtttgccgacagcgcagacaccttgccggatatgggaacctccgcaggaagcacgctttccattggtcaggaaatgcagatgggcgactattatgtccgccagctacgcggcagcgcgccgttaattaatgacccgctgttaacgcaatatattaattcgctggggatgcgtctggtttcgcatgccaattcggttaagacaccgtttcatttttttctgatcaacaacgacgaaattaacgcctttgctttctttggcggcaacgtggtgctgcactctgccctgttccgttattccgataacgaaagtcaactggcttcagttatggcgcacgaaatctcccacgtcacccaacgtcacctggcgcgagcgatggaagatcaacaacgcagcgcgccgctgacctgggtcggcgcgttaggttctattttactggcgatggccagtccgcaggcggggatggcggcgctgaccggtacactggcgggaacacgtcaggggatgatcagtttcacccagcaaaatgaacaggaagcggaccgcattggtattcaggtgctgcaacgctcgggattcgatccgcaggcgatgccaaccttcctcgaaaaattactcgatcaggcgcgttactcctcgcgcccgccggaaattttattgactcacccgttgccggaaagtcgtctggcagatgcccgcaaccgtgctaatcagatgcgcccgatggtggtgcagtcgtcggaagatttctatctggcgaaagcgcgcacactggggatgtataattccggacgtaaccagctcaccagtgatttgctggatgaatgggcgaaaggaaacgttcgtcagcaacgagcagcacaatatggtcgtgctttacaggcgatggaagccaataaatacgacgaggcgcgtaaaacgctgcaaccgttactggcggcagaacctggcaacgcatggtatctcgatctggctaccgatatcgatcttgggcaaaacaaagccaatgaggcgatcaatcgtctgaaaaatgcccgcgatttacgcaccaatccggtgttgcagctcaacctggcgaacgcttatttgcaaggcggtcaaccacaagaagcggccaatattctgaatcgctacacctttaataataaagatgacagcaacggctgggatttgctggcacaggcggaagccgcgctaaataaccgcgatcaggagctggctgcgcgagcagaaggttatgcgctcgccggacgactcgatcaggccatttcgctgttgagtagcgccagttcgcaggtgaaattaggcagcctgcaacaagcgcgttacgatgcgcgcatcgaccagttgcgccagctgcaggaacgctttaagccttataccaagatgtaattcgcattaaaggaagaacaatgaccaaacaggtaaaaatctaccataacccacgctgttcaaagagccgggaaacgctgaacctgctgaaagaaaacggcgtggagccagaagtggtgctctaccttgagacacccgccgatgcggcaacgctgcgcgatttgctgaaaatactggggatgaatagcgcccgtgaattgatgcgccagaaagaggatctttataaagaactgaacctggctgacagttcgcttagcgaagaggcgctgattcaggcaatggtggataatccgaagctgatggagcgcccgattgtggtcgcgaatggcaaagcgcggattggtcgtccaccggagcaggtactggaaatcgtgggttaagatgtgctccatcgctagttgaagcacattgccggatgcgacgcttgccacgtcttatccggcctacgaatactatggattaacttcgcgtagttcggataaggcgttcgcgccgcatccgacaataaacaccttatctacaacttcagaatttctttcacaaacggaatggtcagcttacgttgcgcggtaatcgacgcacgatccaactgatccaacgtcataaatagcgtgcgcatttctctgtcgagccgcttcagcaagaaacgccccacatcttccggcagttcaaaaccacgcaaacgcgcgcgtaactgtagcgcctgcaacttatcttcatcagaaagtggctgcaatttgtagatctgcccccagtcgagtcgcgacgcgagatccggtaatcccagattcaactgccgcggtggacgatcgccggtgatcaacaaccgtgttttgcccgattccagaattcgattgtagagatcgaaaatcgccatctcccacaactcatcgcctgcaatacactcaatgttgtcgatacagaccagcgacaaatgctccataccgtcgagcacttccggaacaaaccaggtgcgtttatccagcgggacatagcccaccgcatcgccacgctgcgacaattccgcgcaagccgcgtgcagcagatgactgcgccccgcgccttcgcgtgcccagagatagatgtaaccgctatgttcctgacgcagcacgttttgcagcgcggccagtaaagaggagttatcccccggccagaaacttgcaaaggtttcgtcgtcaggaagataaagtggcaaagagagctgtgccggtgtgttcagagatacctcaaccaggatttcacaaaatcgcgagaagtttaccacagaatcccatgatgtttgaaccgggcagcaacactgcccggtcggtacattatttgtctgttatatccgcgtcttctgcgtccagcaccacttcttcagggcgcagcacactgatcagtttgaagatcaaacttaagccgataccgacgatggtcgccagcgccatacctttcaactccgccgcgccgatgtttaccttcgcgccactgacgccgatgatcaaaatcacggaagtcaggatcaggttctgtgctttgttgtaatccactttcgattcgatcaaaacacgaataccggaagcaccgatgacaccataaagcagcagcgaaacgccgcccatcaccggcaatgggatcatctggatagcggcagccagtttaccgacgcaggaaagcaggatagcgaaaatcgccgccccgccgataacccaagtactgtaaacacgggtgatcgccatcacgccaatgttttctccgtaagtggtatttggcgtagagccaaagaagccggagatcacagtcgacaggccgttagcaaacatcgaacggtgcagacctggatcgcgcagcagatcttttttgacgatattagccgttactaccaggtgccctacgtgttcggcaataaccactaacgccgctggcagaatagtcagaatggcaaaccactcgaagcgcggcgtatagagggttggcagcgcaaaccagtgagcattaataatcggcgtggtatcgacaattcccattgcgaaagagagcgcgtaccccaccagcacgccaattaaaatcgggataattgccaggaaaccacggaacagcacggaacctaaaaccgtgaccgccagggtggtaatagagatgatgatggttttggagtctggcgtttgcccttcagccgggagtaaacccgccataccggcagctacgcccgccagctccagaccgatgacggcaacgattgcgcccattgccgcaggtggaaacagcacgtccagccagccggtccccgctttcttcacgataaaagaaaccaggcagaacagcacgccgcacataataaagccgcccagcgcgacttcataccctaacggcaacagtaacaataccggtgaaataaaggcaaagctggaaccaagataagccggaattttccctttacagatgaagagatacagcagcgttccaataccgttaaataacagtacagtcgccgggttaatatgaaataagacgggcaccaggacggttgcaccaaacatggcgaacaaatgttgcaaactaagcgggattgtctgtaaaagtggcggtctttcactcaccccgatagcacggcgcgtcatagtattatcctctgtattatgtgttataggcgctttactcaaaaaaaaagccgactcttaaagtcggctttaattatttttattctttatttcgtaccaaagattttgtcaccggcatcgccgaggcccggaataatgtatccgtgctcgttcagtccctggtcaatcgatgcggtatacagttcgacgtccgggtgcgctttttccagcgcagcgataccttctggcgcagctaccagcaccagaactttgatgctgctgcagcccgcttttttcagcaggtcgatggtcgcgataacggaaccaccggttgccagcattgggtcaacgatcagcgccatacgctcatcgatgttagaaaccagtttctggaagtacggtaccggctccagcgtttcttcattacggtacataccgacaacgctgatgcgcgcgctcggaacgttttccagcacaccgtccatcataccaagacccgcacgcagaattggcacaacggtaattttcttacctttgatctggtcgatttctaccgggccgttccagccttcgatagttactttttccgtttcgaggtcggcggtcgcttcgtaagtcagcaggctacccacttcggaagcgagttcgcgaaagcgcttggtgctgatatcttgctcacgcatcagtcccagcttgtgtttgacgagtgggtgtttgacttccacgatcttcatactctttctcctttgaggggcagccacaaaaaaaatcgacggattatacctcctttcttcaaggcggcaatattattttcgttgactttagtcaaaatgataacggtttgagataaagttattttatattcaaatggttatgaaagaagattattccatccgaaaactaacctttgccctggcacaagtcttctttcgccgcgcgcctggggaaaagacgtgcaaaaaggttgtgtaaagcagtctcgcaaacgtttgctttccctgttagaattgcgccgaattttatttttctaccgcaagtaacgcgtggggacccaagcagtgaccgataaaacctctcttagctacaaagatgccggtgttgatattgacgcgggtaatgctctggttggaagaatcaaaggcgtagtgaagaaaacgcgtcgtccggaagtgatgggcggtctgggcggcttcggtgcgctgtgtgcattgccgcaaaaatatcgtgaacctgtgctggtttccggtactgacggcgtaggaaccaagctgcgtctggcaatggacttaaaacgtcacgacaccattggtattgatctggtcgccatgtgcgttaatgacctggtggtgcaaggtgcagaaccgctgtttttcctcgactattacgcaaccggaaaactggatgttgataccgcttcagcggtgatcagcggcattgcggaaggttgtctgcaatcgggctgttcactggtgggtggcgaaacggcagaaatgccagggatgtatcacggtgaagattacgatgtcgcgggtttctgcgtgggcgtggtagaaaaatcagaaatcatcgacggctctaaagtcagcgacggcgatgtgctgattgcactcggttccagcggtccgcactcgaacggctattcgctggtgcgcaaaattcttgaagtcagcggttgtgatccgcaaaccaccgaacttgatggtaaaccattagccgatcatctgctggcaccgacccgcatttacgtgaagtcagtgctggagttgattgaaaaggtcgatgtgcatgccattgcgcacctgaccggcggcggcttctgggaaaacattccgcgcgtattgccagataatacccaggcagtgattgatgaatcttcctggcagtggccggaagtgttcaactggctgcaaacggcaggtaacgttgaacgccatgaaatgtatcgcaccttcaactgcggcgtcgggatgattattgccctgcctgctccggaagtggacaaagccctcgccctgctaaatgccaacggtgaaaacgcgtggaaaatcggtatcatcaaagcctctgattccgaacaacgcgtggttatcgaataatgaatattgtggtgcttatttccggcaacggaagtaatttacaggcaattattgacgcctgtaaaactaacaaaattaaaggcaccgtacgggcagttttcagcaataaggccgacgcgttcggccttgaacgcgcccgccaggcgggtattgcaacgcatacgctcatcgccagcgcgtttgacagtcgtgaagcctatgaccgggagttgattcatgaaatcgacatgtacgcacccgatgtggtcgtgctggctggttttatgcgcattctcagcccggcgtttgtctcccactatgccgggcgtttgctgaacattcacccttctctgctgccgaaatatcccggattacacacccatcgtcaggcgctggaaaatggtgatgaagagcacggtacatcggtgcatttcgtcaccgatgaactggacggtggcccggttattttacaggcgaaagtcccggtatttgctggtgatacggaagatgacatcaccgcccgcgtgcaaacccaggaacacgctatttatccactggtgattagctggtttgccgatggtcgtctgaaaatgcacgaaaacgccgcgtggctggatggtcaacgtctgccgccgcagggctacgctgccgacgagtaatgcccccgtagttaaagcgccagctctgccgctggcgtttttcaattcacctgtaaatcgcaagctccagcagtttttttcccccttttctggcatagttggacatctgccaatattgctcgccataatatccaggcagtgtcccgtgaataaaacggagtaaaagtggtaatgggtcaggaaaagctatacatcgaaaaagagctcagttggttatcgttcaatgaacgcgtgcttcaggaagcggcggacaaatctaacccgctgattgaaaggatgcgtttcctggggatctattccaataaccttgatgagttctataaagtccgcttcgctgaactgaagcgacgcatcattattagcgaagaacaaggctccaactctcattcccgccatttactgggcaaaattcagtcccgggtgctgaaagccgatcaggaattcgacggcctctacaacgagctattgctggagatggcgcgcaaccagatcttcctgattaatgaacgccagctctccgtcaatcaacaaaactggctgcgtcattattttaagcagtatctgcgtcagcacattacgccgattttaatcaatcctgacactgacttagtgcagttcctgaaagatgattacacctatctggcggtggaaattatccgtggcgataccatccgttacgcgctgctggagatcccatcagataaagtgccgcgctttgtgaatttaccgccagaagcaccgcgtcgacgcaagccgatgattcttctggataacattctgcgttactgccttgatgatattttcaaaggcttctttgattatgacgcgctgaatgcctattcaatgaagatgacccgcgatgccgaatacgatttagtgcatgagatggaagccagcctgatggagttgatgtcttccagtctcaagcagcgtttaactgctgagccggtgcgttttgtttatcagcgcgatatgcccaatgcgctggttgaagtgttacgcgaaaaactgactatttcccgctacgactccatcgtccccggcggtcgttatcataattttaaagactttattaatttccccaatgtcggcaaagccaatctggtgaacaaaccactgccgcgtttacgccatatttggtttgataaagcccagttccgcaatggttttgatgccattcgcgaacgcgatgtgttgctctattatccttatcacacctttgagcatgtgctggaactgctgcgtcaggcttcgttcgacccgagcgtactggcgattaaaattaacatttaccgcgtggcgaaagattcacgcatcatcgactcgatgatccacgccgcacataacggtaagaaagtcaccgtggtggttgagttacaggcgcgtttcgacgaagaagccaacattcactgggcgaagcgcctgaccgaagcaggcgtgcacgttatcttctctgcgccggggctgaaaattcacgccaaactgttcctgatttcacgtaaagaaaacggtgaagtggtgcgttatgcacacatcgggaccgggaactttaacgaaaaaaccgcgcgtctttatactgactattcgttgctgaccgccgatgcgcgcatcaccaacgaagtacggcgggtatttaactttattgaaaacccataccgtccggtgacatttgattatttaatggtatcgccgcaaaactcccgccgcctattgtatgaaatggtggaccgcgagatcgccaacgcgcagcaagggctgcccagtggtatcaccctgaagctaaataaccttgtcgataaaggcctggttgatcgtctgtatgcggcctccagctccggcgtaccggttaatctgctggttcgcggaatgtgttcgctgatccccaatctggaaggcattagcgacaacattcgtgccatcagtattgttgaccgttaccttgaacatgaccgggtttatatttttgaaaatggcggcgataaaaaggtctacctttcttccgccgactggatgacgcgcaatattgattatcgtattgaagtggcgacgccgctgctcgatccgcgcctgaagcagcgggtactggacatcatcgacatattgttcagcgatacggtcaaagcacgttatatcgataaagaactcagtaatcgctacgttccccgcggcaatcgccgcaaagtacgggcgcagttggcgatttatgactacatcaaatcactcgaacaacctgaataaccctatgccaatacacgataaatcccctcgtccgcaggagtttgctgcggtcgatcttggttcaaacagttttcacatggtcatagcccgtgtggtagatggtgccatgcagattattggccgcctgaaacagcgggtgcatctggcggacggcctggggccagataatatgttgagtgaagaggcaatgacgcgcggtttaaactgtctgtcgctgtttgccgaacggctacaagggttttctcctgccagcgtctgtatagttggtacccatacgctgcgtcaggcgctgaacgccactgactttctgaaacgcgcggaaaaggtcattccctacccgattgaaattatttccggtaatgaagaagcccgtctgatttttatgggcgtggaacatacccaaccggaaaaaggtcgcaaactggttattgatattggcggcggatctacggaactggtgattggtgaaaatttcgaacctattctcgttgaaagccgccggatgggttgtgtcagctttgcccagctttattttcctggcggggtcatcaataaagagaattttcagcgcgctcgcatggcggcagcacaaaaactggaaactttaacctggcaattccgtattcagggctggaacgttgcaatgggcgcttccggtaccataaaagccgcccatgaagtgttaatggaaatgggcgagaaagacgggataattaccccggaacgtctggaaaaactggtaaaagaagttttacgtcaccgtaatttcgcatcgctgagtttaccgggtctttccgaagagcggaaaacagtcttcgttccgggactggcgattttatgcggtgtgtttgatgctttagccatccgtgaactgcgcctttctgacggggcgttacgcgaaggcgtactgtatgaaatggaaggacgtttccgtcatcaggatgtgcgtagtcgcaccgccagcagcctcgccaaccagtatcacatcgacagcgaacaggcccgacgggtgctggataccactatgcaaatgtacgaacagtggcgggaacagcaaccgaagctggcgcatccgcaactggaggcgctactgcgatgggccgccatgctgcatgaggtcgggttgaatatcaaccacagcggtttgcatcgccactccgcttatattctgcaaaacagtgacttgccgggttttaatcaggaacagcagctgatgatggcgacactggtgcgctatcaccgtaaagcgattaagctcgacgatctgccgcgctttaccttgtttaagaagaaacagttcctgccactgatacagctattgcgccttggcgtattactcaacaatcaacgtcaggcaaccaccacaccgccaacattgacgctgattactgatgacagtcactggacactgcgtttcccgcatgactggtttagtcagaatgcgctggtactgcttgatctggaaaaggagcaagaatactgggaaggcgtggctggctggcggttgaaaattgaagaagaaagtacaccagaaatcgccgcttaatactttgcgggccgacgagaaatgtcggcccgcattattcaggcactttcgcgaatgggttcgatttcattcagcgtatcaattaacggctgcggcttaccaataagataaccctgcatataatcgatccccaaagagagcaccgcctcgcggatctcttcgttttcaacgtactctgccactaccagcattttcttcattcgcgccaggtggcaaatcgatgccactatctgataatccagactatttgacacaatattgcggataaaactgccgtcaattttaagcagatcggcattcacatttttaagccgcgcatagctggcgtagccggtgccgaaatcatcaatcgcaatctggcagcctaattcctgaagatgctgcaaggtgatttgcgcctgcttaacattggtcagagcattactttcggtgacttcaaaaataagttgccacgcttcaatctgatatttagccagcaactgactgacttcaacaggaaaacgggtgatgctgccaacttactgatttagtgtatgatggtgtttttgaggtgctccagtggcttctgtttctatcagctgtccctcctgttcagctactgacggggtggtgcgtaacggcaaaagcactgccggacatcagcgctatctctgctctcactgccgtaaaacatggcaactgcagttcacttacaccgcttctcaacccggtacgcaccagaaaatcattgatatggccatgaatggcgttggatgccgggcaactgcccgcattatgggcgttggcctcaacacgattttacgtcacttaaaaaactcaggccgcagtcggtaacctcgcgcatacagccgggcagtgacgtcatcgtctgcgcggaaatggacgaacagtggggctatgtcggggctaaatcgcgccagcgctggctgttttacgcgtatgacagtctccggaagacggttgttgcgcacgtattcggtgagcgcactatggcgacgctggggcgtcttatgagcctgctgtcaccctttgacgtggtgatatggatgacggatggctggccgctgtatgaatcccgcctgaagggaaagctgcacgtaatcagcaagcgatatacgcagcgaattgagcggcataacctgaatctgaggcagcacctggcacggctgggacggaagtcgctgtcgttctcaaaatcggtggagctgcatgacaaagtcatcgggcattatctgaacataaaacactatcaataagttggagtcattaccggaaaacgagcctgacataccgaggttggagacagattaatagcaaaacggtgagcgggcatcttcgctctgttttcagccataaattgcagcgtatgctcaatgacccacatgtcgatactcgacgataaaccaaattcgtgcgcgaccggcaagaagctatcggggctgatcagttcatcattctcacctttcatgcgcagaagaatttcatggtaaacatcaccacgcataccggtaatcggctgggccatcaggaaaaaatggttgtgttccagcgcctgctgtagtcgattcatcatcgcgactttatctttcaattcgcgttgcaaatacattgccccgcgacgctgcatattttccggggcgttggtcacgatggaaagttcggcgaccgtatttagctctcccagcagcaggtagatatgattcactggcgagcgcacatagcagtaactgacgccaatctgcggttgcatcggcatgccatcccaaaagaaacgaaattgcttgagatggctatccagtgcggtaatgcgctcctggtgcgattctgtattcagtcgcagcgcgagatcgttacccgaaagctgataaacatcttcacccggttccagcaagggtgacagccagtgagaaagtttttgcttgtattgaatccgcagcatgatgccatagttcttaaccagcatttccatgccagggatgcgtaaataacaaagcgcagaccagggggcatcacgcaacgcgcgattcagggcgcgaacatttggcagatgaaccaccgggtccacatacgcaagccgctgaatgcgtctgactaccgctctctgacgggttgccagtacagccatataattgacaataaaagagaataccagataactggaggaggttatggtcagctgcgtggtatagccaggataaatgggaatgtaattttgatagctgtggatgctgatcatcaacacgaccgcccagagcagcgaaatcagcttataaccatagcgcatcgctccccacatcatcaggggcagcaataatgacaaggtataattggtgctaaaaattgtgcttttttcatttaacggcatgcataacagcaacaataaagcacctaatgccagtagccagagcgcgaactcttttttggtgactttggcatcaacctgctgttttaattgcgaataatagctacgtaaataaaatggatttcgcactacccgaatgatgaagtagcacagcgggacaccgatcagattacccaccagtaaggcctgataattgattaaagtcccgaggttaaaaggcatgacaccgaccagattttctctgctcgccagtaatcctacaaatgcagcaaactggaaaagtatcagaaacagcgttgcaggaaacacaatctgccagaatatacgctgggaaattaaacgggtatcaccatgtgaaacgttgttacgccggggagtaaagaccctgtaaccgccccaacagagaatgataatgataataaaattagccgttaatgatagcgtttcgtaaaaacccagctctgcatatttgcggacaaaaatccctaaggcgatccctggcaatgccgcccagctgaaaaacatcatcatgctgatcatcagtgccagaggcagataaaagagaaaaacctcaccggaagaaatatgcgcgaaagtattaatgtgggcgaaaatgggcaagattaaagaaggcaggaacagcggaagcccccaccatttatcacgtatttttatataagttgcattcagtttcatagatgctcagcagaatcccccacatcctgaaggaggtgtattcagacaggcatcccacctgacttcgaatgatgattattcatcactatagagagcattgattctaagtgtcatatgaaagtaccaattgatatatatcaaacaaaataaccctgattaatgaattattacgtttatcatgttaattcatcattattacatcatcattgtaaataattaaattaacttccataacattaaaatatgtatccactgacgcttttttacataacgaagaattgaccattttgtcctgttgtgccttaatgtaagtaccgtccacagcgtgggacatacttcaaggaaccttttgtgagtcaggcaaccagtatgcgaaaacgacaccgatttaacagtcgcatgacccgtatcgtactgctcatcagctttatcttcttctttggccgttttatctactcgtccgtcggtgcctggcagcaccatcagagcaaaaaagaagctcagcaatccacactctccgtcgaatcaccggtacaacgttagcggttaccttctccactttcacagaacataacggcacttcgctgtcggatgcttttgctgtttgggattatcaaagcggcagatattctttcatcttaaattttacgtctttatcctgactgatgtttatcctgtttggctgcgaaataaatataaaattaatatatatgttgtaatgatatatttttataaattattccctgcgtgaattttaataaatttaatctatccctttatacgcaatacatttactttcctcttttgatgatcttaaatgtcttatttttcgtaatgtgtataacaaggaatagtgatgaaatttaaaaaatgtcttctgcctgtggcaatgttagcgtcattcactctggcaggatgccagtcaaatgctgacgatcatgctgccgatgtttatcaaaccgatcaactgaataccaaacaagaaactaaaaccgttaatattatttccattcttcccgcaaaagttgccgtagacaactcccaaaataaacggaacgcacaagccttcggcgcgcttattggcgcagtcgctggcggtgttatcggccacaacgtcgggtctggcagcaattccggaacgacggcaggtgcagttggcggcggagctgtaggcgcggcagcgggttctatggtgaatgataaaaccttagtggaaggtgtttctttaacctataaggaaggcaccaaagtgtatacctctacccaggtgggtaaagagtgccagtttacgacaggtttagccgttgttattaccacgacgtataacgaaacgcgtattcagccaaataccaaatgtcctgaaaagagctaataatcaggaggagtcatgaagaaagtttttctttgcgccatcttagcctccttaagctatccggctatcgcctcatcattgcaggatcaactctctgctgtcgcagaagcggaacagcaaggtaaaaatgaagagcaaaggcagcatgacgaatgggtcgcggagcgcaacagggaaatccagcaagagaagcaacgtcgcgcaaatgcccaggccgccgctaacaaaagagcggcaacggcagcggcaaataagaaagctcgtcaggataaactggacgccgaagcctctgcggacaaaaaacgcgatcaaagttatgaagatgagctacgcagcttagagattcagaaacaaaaactggcgctggcaaaagaagaagcccgcgttaagcgagaaaacgaatttatcgatcaggaactgaagcacaaagctgcgcaaaccgatgtggtgcaatctgaagctgacgccaacagaaatatgactgaaggcggtcgcgatctgatgaaaagcgtgggcaaagcagaagagaacaaatcggacagctggtttaattaatcgatgttagtaacttcaatcctataattcttgaagataaaaaaccctctgtagtaacagagggttttgttcattcatagtgcagggtcaaatcattcccactcaattatttacggataccataaccaattgagttataacatttttctaaagttcaatttttccagtaccgttttatataccgtcaccggaaatcagtacctctatttttgcttcttcaatgagtcgtattgctgctcgcagaattcccctgcaatccgatacttttcagcctcaactgctgttgcgttgtaaactcggttgctttcttcaagcatgtcggcgagcacaccaatgaccttgctggctggcgtgccagaggggaaagatccggtatagtgttcggcgagtcgcttggtattgtcaagctcggcgcgcatgctgtcagcaacggtattagcatactcagcatcagcaagcgccgcatcgatacgggattgtgcttcacgttcaatttgtgttttctcctgctcacgctgtgacctgaacttatcatcagcctgtttctgatcttccttcgcctgcgcatacccggcgtcgtactgacgactgccgtgtgcattccaggctacaactcctgatatgaccagaacagcgagcatcgccatgataaccaactgtttccagtatgcttttgcgaatgcccagatcataccaccagcaccttactggcagtgatgtaccgcgcgcgccggtcgtcgatgccgttccggccaccattgataatcagagttacacgtgcaatatcgccggtatacttcatgcatcctttgctggcgaagaaccacgccgcgctacgagccgcgtattcgtcctgcgccagcagttcaggattctccagcaggtcaactttcagaccgtttccgcagtcacgatagttattcaaaccggtaatctggataagcccgcgcccacggtaattccagccatcgcctggagcattgttacccatgcgtttgctgtacaccagatttgcgatcgcgcgctggcgatcgagtggcaatggtggctcaccagcacggcggcccagtgcgttagcctgtccctgggtgagacgcccagcccgaacgaagttagccagtccggtgacgctgtagttgaaattttcctgcaaccgattgaagcccccagactcatgcccgacctgagcaataaacattgcctgatcttcgggtttgctgataccaaactctttcatcgcagaagttatatgcgagaaccagcgtgcggccagcgcctcgctaataccagcagctcgctggaattgtttaatctccatgtttagacctcgttattttgaaaatctgaacgacgttaccgcgcgttttaacaaccgcagcaagcatgacagcgttgataatgacctcagataaatccacagccattggcgtgcgtagccatattgcatagacagcacgaactggaatactggccgcagcaacaatcagaaaataagcaagccagcctccccatcttcggtgttgagaaccgttacgccggaatgtgacaacacgaattgctatgccagtacaaataactgcattggtgataagcaaaaaaagctcatgcgttaccatcgtcttttctccccggaattaactctcgtggattatcggagcggtgataaagccatataccaattcgcacggcgacaattgacgacacaaatgcaccagcagagaagacgatccctttctcgaaagagtcctgcgtgatggtagggatcaggctggctacaccgataaggatggatgctgtaggtttgtaaaagagaaggccgcagaggaaactgagcatagacaggagaacccggcgatgaatgggatactcgatggctgaggtaacaaaaattaccgccccagccaaagctcccaaagccacctctggaggaacccctgctatcaccgcagcaagagaacccgcactaagccactgatttaaagactcactggttagctgaactgacataaaaaccaccgtttaatgtgcataacgaaccccttagttggtgatcacattatacacaataaaccatatgtggtttaaaaacattaggcagatcttaacgatattaccatatatgtagttctgttaaggtgaactacaatcataactaagtaattaattgatagttcacaatatttttgaatgcacaggaagcgtatgtcattgattattagtgacatgaaaattagccataataaagctatactttatgctgtcgcattccactctcctgtattcatcacccacgctgataccacccttgaatataccaatgtggctgtggtcattttgatctgagatgtatttgctcctgtgacatttactggaacccctgcaatagatagcgatgatatatttgaacccctgagaataaatccaatcttctgaccatcatatggcgtccctgtaaatgatatgttttctcctgatataacattacgtctataccaagagaatcccatattaatatcaacagtattatctgataactgaagaacaccatttctgttaacttttgccgacgaaagaacaccaagatctgctgatgtaattccctggtctgatttccatgtgttgatattaactacaatgttggtcactgtggcatcagaacctccatcaattttaaagaatccacctgctcttgatccatagacaggctcatcaatcaaagcatttagggtgagattgcttgcactataggcgtttgctggcagaccagcagttgttgatgagtgagtacaacggtgaaataaagcacctacagaactcgacattcttacgtctgacgagctattgttttcaaagtacataccgtagacttttgtaccttgcgcttggtcaaggaacccatatttactgcaattttgactaaatccacctacaaatactacggcttcagtcgggaatgtattcacatagtcccacgtcgtctcaccattaagaccatgcctaacaattattccgtattgcggcatatcaatttctggagtgcctgaataaccattaaaaccagtaactgttatagcatttgcgccgtttcttaaaagaagtctaattgatccagtgccaccaccgataacttcacagccatctacttttagcccgtaacatagagtgccaatttcaattccaacgttgttggcggcagttcccatattgacccacatcatgtcaagatgtccatggtttctgaactttatccctacaaatcctctacaccctgtcttcccgctaatgtcaattctcacgttgtgtaacttaacattccttactccattccctcctgaaattgtcggatcgcaggtcattactgtcatgttattgtttgcaggatataatgttgctccaggatcccaccaaatttccgtgtttggatatatcgcccatgctgtgctggttgtataagttcctgatgaaacgtatatctgaccagctgatgaaaggattgactgtatctgagtagtattcatagatgggtaaataaccttcgacggcttaacgctacctttataagggtaatcttcccaaatgctgttcccgccccacgaactaccaacatgcttatcgaacccaggctgcgcgatctgtaataatacgtcagatgctgaaccggatggtggcagtacaggataagggttacctgcactgtcaaacgcaactattttatttgccctagtcgctgcgtcaggaagttgagggatttgctcaggcactcgtagggtgcggctgtaattattgcttgccagcgagtcgacataattctttgtagccgcgtcctgttggcgtatgggatcgcgaagatttctaatatagttgttcaaagcatcataatagtttgccacgaatgatggcttgcgaagcgctaggctaaaccaacttctaacctgctgtatcagcatcgtcagtttatcgaatgcgtcttcatgcacctcagcgaagaacttaccctggttgcgcagatcggtatcctgcgtaaccggtagctctcttgatatagaaatctgataaccgttaaccaacgccttcgacagaattacattgccgccgttataccctcccgcaccagtgactatgtaatcagtatcaagaatcagctctgtgatgttctcgttcaggtcaacaacctgcactactaaatcagatttctggaaaatcctgaaggtataagggaatgtcgttgtaacaccgttaccggtgtattcgttgtggtcaacttcggttgagaccgtcatgttaaatctccagatagtcgcagcacccgttgcgccgcatatccggttattctattacctgaaaaaccatatatggatagacaacccataaatacgaacagatattacctttcaggtgattcgcaaaacgtgctggatagcaaataaattatttgatactgtatatttatacagttattgcatggagaagataagatgcagcagtatcactatccactggaagacggatttaccgaaaggattcacacgccgggaggcgttagatcactggtggagggatcgcacttgatgaaattactccgggagctcgataaggatggatttaatgtcgatggcccacttgccgaactgactgcactgattaactacgtcaccagctcacagatgtctatgcgggatctgcaaacacatctcgactattgtgccgaacaattacgaaaacaaaccagataaggtttgcaattaccaagtggagtgcttatatttacctttgcggtaaatttacatcgcactcctcttgtgccatagtaatcgggcactggaaaaatccagtgccgggattggcgtcccgagttactaagtggcgcataccacgccagacgtggtttttttatgcgttaagcacagccatatccgaattatggtgggctgggcaggggtccgaaaggacgccggtaccacttaggccggtacgccaaccttgtccagttcaccaccagtaattggcgttgcggtggtgattaaaatcactaagtggagataaccaccatggctaatgctcaaactgccatcttcaaatttgaatctgttaaccctatccgttccatcattatcgatggccaaccatggtttgtagcccaagacgtttgtagtgcgctgcgtatccaaaacgtcacccaatcacttgaaaaactggatgatgatgaaaggtctatgttcaacatagggcatgaacatcgtgcaatttttgatagccgagtaaaagagctcaacatcatctccgagtcaggcctctacacactgatcctccgctgccgcgatgcggtgacaccaggcactatcccctaccgctttcgtaaatgggttacaggtgaggttcttcctcagatccgccgcaccggaagttacattaaagactcgctcccgcaggaagaacgcataaagatggttgccgaccaggtagccaacgccacggcgtcagcagtaatacaggcaatgaagatagagaacaaaacctacagtgccccactgaagcccggctaccgcagcctgattcactcgccgtctggtgttctcggcctgacggagaactcactgctgatgaatctgctgaaccagttgcaggacgacgggcacgacgtatctggcgcggcggcggagctgaccaccatgttctgctacatcgtcggtgtgagcaaatgcctgcgtgatatccagacgcacgcggagtacatcaacgacaaggcagggttcttctgacagaacggcggcacagggatgtgcctttaaataattctgtacagattgcagactgtgggtgaatagcgtactattaccttaaaggtaaaggaggcgcgatatgacagcgttgaaaaatcgtactcagcacaatgaacaagccaagcaatgctgggatgtcattggaaaagttatgcttggccgcgcaagcaaagagcgcgacaaggatatggtttaccagacaggaacatctttcagcgacttcaaggcggcatttcgctccaaatagaagcacatcaggagttttccttgaagtttaacattagaatatctaatagttttctacatggggaaagcaacacccctttcgctgtagacggacctttccttactgatgatgaaataaaaatcatacaaagttttttagaggatgttgccaatggaagggcgcttgttggaaaaaacaagccctcgtgggttgatgataaccatgataaaattcccggctcagacaattatgagcaagagaattattggcattatcattgtgggccaacatggtatccaaacacatttaagaattataccattaacttaaatttcaaccctggcggaatgcattctaatgaatgcattcattatgcaaaaaatgataatgaaattgtcattgttggattttcaagagaacacatacctttcctttcatcagatggaaataacaatccgctttttaatgatgaagaagaataagcccgcgctgcgggattttttgtggacgaaacaaaagtcagtgctaacactcattgacgccacattgaggtggcttatagatggaaatttcacaatgaaaaaagcatttgctgcactgttcgttttgttgtctctggtagcttcaactcaggcctttgccggtcgttgtcagcacgacagcgacactgctgctgacggctcccgctgcggtgggcgttctgcggattcccgcccgggtggcggtggcattcgttaaaaacaaggccgcgaaagcggcctgtgacatgtcacgacttataaagatgactgatattttacaactctgttcatggcatcttttttcaccgagctgatatcagttcttattttggcttcgtcattactgcttatcatgctattaattttttgcactgacatgccgtttctttcagccattgcacatacagcagcatcgtatgaagaactcgctgcgatggatatcaccttgttacactcaaacacagcaccttcagcaatatcagatgccgatgaggctggcttggtataagtcttgacgtagtgatcaatacaactatccttcgccgtcttggcaagagaaaaatccattttaactttgtcgcaatatgccttatcaacaccgtcataaacatcataggatgtcgagcaagcggatatcaaaaataccgataacagcaataattccttcattgttgttccttattgcggagtgacatcctgaggtcgccaccagtatgtctggttaaactctttcttcgaacgttgctccattttacgcaaatagcctggtgaaaaatactcctgcatctgattaaagatcatgtgatcgagagccgccttcaagtaccagagattcgcaccaggcatcaaacctttcccaagcttaaccagatcaccaccagtctgctcattcttcccttccacagcatttaacggtatgccctgagcaatcttcactacgtcatcaaccagaccagctaccgggccaagcatcgacgctagtgcgccgctcccgtacctggtgtggtcagagaaaagaaaatcaccatacaaccctgccccaccaccttttaaaaatgcatttatccagaatttaaccatgttgtcaccggtcatttcttttggatttctcccattaataagatcagtaatctgcatggaaagagcaccaagcatggttgtgcttgctaaaaacgttgctatatatgccgcacgcccaccagcagacggcatccccatagctctatgccagtgacgcataactaccgagatagggaacgatttaaacaggaaaacacttctcgttaattcacctttccatgttccacgctgaagaccagaccctacgaacatccgttcacgtgcgcccggtgtaataacagccatatcaacttcttcagttacggcaccgagcagtttacgcattgcctcaaatttcacacgttcaggctcaccaagatgtttaactgctgaatcagggatacgcataatgctttccggtgtcagcatcgtattattaccgttcccccagtcctcctgttgcgccagcttccatacgctccagtctgtgtcagtaatccctttgcttttcaggatacgaaaatcatagtcatcgaggctacgaaggtctggtgtccgtgacactacttctcccaggcttcccatcatggttacgccataggcgcgcttgtgcgcatctgaccatgctgtaagcccactggcacgcattaccgccgttgccgcccaacgagacactgacggccccatattatccatcgcccagcggttaacgctgccaagtagagattccatcgccagaccagcgcggcgcgcccgcgcaagttctgtacggttcgttgggtccatagcttcaagctggttgcggaataactggttcattggaaggttggtaaccttcgcagacagatacatggttccaagatcagagaacgatgacagcaacgcggatccgagtctgctggcaaccagccagttgcggatattgtcagaccatcgcgcgatgtgcggattcgctacaggctgtgtctttccggaaataaagttgtacaggttctctgttttgttcgccagccgctcgactttaccggttttactcgggttagctgttgccgtttctgccttaacctgatcaagaagggagcggaaaacatgatcggggtttggaccatatgtttccaccagtgcaatatctttactgataccttccaggtgaccgaccatgatttcccatagagagcgatcgccataaagttgctgatattgcagataggaatctgcatctttgaaatgtatctgtcgtgatgcattaccacggttagcacgtgcgccggaaattcgcattccggtatcagtaagcttattcagcccaccagtagcgatcgtgttataagcctctccaagaaatgcagacaactcggcatcgttcatcagttgtccatcggctcggatataatatttgcgatccagcttacctataacatcgctaacccacttatcctttgataccgccccaaccttttccatagaatgatgttgagggatcccccagttttcgagatagccaatgtccccaccagcatcattaaaccggcggcgcagtagctctgtcacttctctccacgccttagcaccttttcttgctttagcattgccagtattttgcccccgcatttcatataccaggtcacgtacgcccgcttcatcttcaaacagaccaaaaaagcgaggatcaactgcttcgaatgcctcctgcaattgactcaatgcataatcacgggtggcttttgttctggattcaacagagaggaaattcgatttaccgtctgcattaaaagcaatagtacggttaagagcgccaagtttcccatcagccccttgatagctattgataaatttatccaatctctgacgtgcggctatagtgagggccacacgacgtttctttaatgccgcttctcgctgtaattcttcagatgccaattgtgctgcacgatatagccgctctgattcggaaagttgtctccacgacatcgggtcatcacgagcaatggagcgcatatttcgataaatgcggtcttcaatgttctgtatttctcgcgccgttaacgtgcgctgcgccgcctgctggaccgcttgtatacattcctgtctcatttaatttaacctctcaagaaacacgccacagcgacatcaaacaggctggaatcctgtattgcctgctcactttccctgttcgcttcatccagtacttcacgcgcgctgcgcgattgtggattaccatcatcatccagcacggtgattatcatgtccggagattcaagcagcgagtcttcagctatacgcagatcaatatctcctgccggatctgccatcattttttgttctgtctgttgcaatatcttaccgggctcaaaaggagctacttcgtctggcgtcctgacctctgctgttttatagaatgaaacagcctgagcattaagttcactttctgcctgctgtcgtcgtgccagttctgctcgagcttcaaaaaactgaccgccaggctcatgcggtgccaacgcgttacgggaaaattccaggcgctcttgtgcctgccggattcgttggtcaatatcgcgaagtctgacctgtttatctgatcgagcacgagacaaagctttaccgctaccggttggctcttctgcaagaatttgtgcgcgctgttcagtgagattttcaataattcgttggctattagcgatttcagactggtaaacctgtctatcgccacgcggcaaaagctgcgcggcctgttcttcaagcaaccgattttctatagcgcgcgccgttactccatcatctacagatgacagagcctcattaactgcctgagacagcagactcttgcgcccaagaatttcactgaaagatgcagactcaacaatgctggcaacgtctacaggtctcccctcgctaacatcagacatagcttttctcagagcctgaatgtgagaattgcgcgaaagcacgttgatcggcacgcctggcgcaatatcaatttcagcatgatgagcggcattcgccgccagtgcagcatcaacatcaactggtgaaaaatttggtgcgcttgtagactcgccgcgagagttaataaatctgccgacaccaccaaacgccaccccaagaacagcatcaatagcaattgcctgtcgatccaacacatcatactggttagccatttcgctatagccaccatcacgaagcgtttttgcagtaagcccacgctgtgccataccgaacgcaatatttgtacctgcggcataggcaatatctggcgttgcacgtactgctgttgctgcggcgcgtcgcactgaactttcacccgtccgcgcaagctgagccgccacaccttccgccagcgcaccgccagcacgtaacccgaggctcattgggatcagtgttccggcaccagcagtaataccctgcactaatcctgcttcctgcgccgtcctgaaatcaacaccctgtgctgtcagccgttcaaactcagaaaaaccctgtagcgaagttaccgccgctgcacctccgaccggaccaccgagcgttgtaccgacaacagcctgcccgcccatatcgaacaacccataaagaacctgcccggcggttccggttgtcgcggcatcaggcgtcagccgcttaacctgctgctctgctagttttctctgctcggcaatgtatgaaactgaagtgtcattgagcgaggtgttttcgttaacaaactgagcaatcggggatacgattttatccatccctgcccatagcaactggtctggctttgccaccagcccggagtacaaaccagacaatgccgctcctacagcattgtcgaaaaaaccaacatcgctgttaaagccagctggatttgatgctgcttcgtcaagctgctgattctggtttactggattaaggccaaagtaactcattgcggaatatctccggagaatctctgacgcttctgtgtcagattaagaacaacgggagaaccatcatctttcagtagataaccagtaccaagtttcaccaggtactgactatcgccgtaactttgcaaaccatactgaccaggcggtgtttttatcccggagccgacaacttgttcattccaagcctgattaacctgcttatcgaattgctctgcagacattccccacggcaaaaggacattccccattccgttatagtcatgcacgccacctgtagctacgttaacagcctgtttccagacatcattgtcaatttcgcctgataccacgccttttttcgccatcacaccagcgtaataatcctttgcgatctcgtatgccattgatgctccctgagcgtcaccagcaaatgcatccttcaccatgtcagaaaactcaaagcgaagatcagcatctttaggcatcggaatacctttcgcgtcatcagtacctttacgagccgccgcgccagcaagaattgtctgcgcagcggtttcaggagacacggaaacatccggattaaaccagtttttttctgccaaaataccacctggcttatccatcagtatcccggcaacggcagcagatggagcgttggcactgatctgctgtagtgctgacatatacacctgcccaccaccagtgctctgcctgatggtatcgagatatgctgcctgttgggaaacgggcgcatcacgaaagaaaacaccgatctgattggcctcgtctttggaaaagaacgtcagtggagtgccatatgacttagcaaggtcactgacctgagcagctcgcaaggcaacgctctgtccaaagttatccttattgctcatgtcgataggctttgcctgtccggcggcaagagagaactgtacaggatcagcctgtcgctgctttatcacctgacttgcagccgacacaacgttgtcataaagagcggctcgtgccgcataaccctcccctgtctcaccagtatccgggcgtaattgctcaacatatgctgtaatgctgcttgtcggcatgttgcggaaagagcctatatactgtccggcgatttgcgtatttctgaactcggtatatcgcaggtttccttctctgactccataagctgcaataaaatcagcctcaccaggtgggttaggaaattcaacgccacgcatatacgcagctgtcgcatcgcgaacctggctgtcaatcatcgttttatattcagcctgctgctgccgacgcagttgatccgcctgtcgcataaaacttgcctgcgcctcaggagatgccgcatcgaatgctgcattaccggtatagcgtttggtgttggttggaattgttgataaaccaagtgctgcactgacaccagcagttaactgctgatcactgtatggctggctaccgttctcatgatggataatggctgcacaaagcgccttcagggtatcaggattagatgcatcgagaggctcatcagcagaaacgccaagttgttcgcacactgctttgatatacgacatagtgtcatttttatcagtaggcggtgcccagcgattaattatctcgctgacggtatcaataccctgcctctgatacgacatcaggttccgccctaatgcacgaatcccgtgttcaggtgtttcgaatttcgcaaatcgaccatcatcaccggtctggcctacccacggattagttttgctgtattcgagatttcctgggttattgttgcgtatgccacgggcacgctcggaagagtcactatctgctacagcacggcgagctccagctgcagtatcacttaactcgccattactttggatgaatgcggtcgcattgtttgccgaccactgggacaatgcggcatcagcaaccttctctttaaactcgattttcttggcctgtatttgctcgtcgctccagccatgcgcaatgccgtaatcctcaatttgctggaaagtttgcttattagccaatatgtatgcggcgttgtcgccatacaatgctgcggcatttttaccattgttcagcagcgtagcctgaaactggccttcttcgtaggcatttatttgccctatctcgtgccgcccggcctgcgtagtgaactgaatgcgctgctgctgcgcctgctgcatgaaagcattacgagcctgttcatccggcagcgacatagccagttgttcgacctgagcatcaaactgctgcgtatactcatggccttttccaatagcatttttccctttcaggttaagcaatcctgtttcaggattattcagcagatcactgcttatctgactgaggttaagagatgcctcctgagccagagcgatattggcacgctgttttgcctgaccaaaaacatcaatagcctctgcccctgcccgaacaaaagcatcaccaatacctggctgagaaaacgtctgcaagcctgctgactgaactccacggctctcaacctgacgtccggatactgttggtacgactggcattataatcctccgggtaatctggttcctgctgctgccccgattggcgcaggagtgctttgagtaaacggactccacgtcccaccaaacatctggtacgcaccgtatgccttcagaggcgcggtgagcaatgttgttgctgctcccacattcccctgtttacgggctgaactggcttctgctttatagttggcagcctgaacctgataaccgtaagcctcgcgttgcgcgttattcaccgtcgtcagcgaatcaagagcgccaaactgggcagtgtcgccaaatatatccagcgcgttacctgtagataaatcagcgccggtagcccccattgtcgccgcctgtgtaccaagccgctgtcgggtctctctgcgccgttgctcagcttcagcgttacctctgtttattgcatcatttgcctgagctgtggctatatctgcgttcgcttctgcaaccttcgagacatactttccctgttggtactgggtgtatgcctgaatgccactcatggcgagcattgcgccaccagcaataaccggatcgcacattattttctctccatgtgaaatctgtggaaattaagaccaagagcaccataaggcgcggcttcttcaagcctgaatccaagccagtgcagccatgctttggcaacatggtttcgctcgtcgacgtagttttccaggcgcggataaactgccagcatctgctgcaatacagggcggcagtggcgcagaaatgtcttctgatatttttcaatacggctggttcctaccagccagggcgtaccattgccaccgatcattgacgccggagatacgccaaacatggttaccagttctccgttcgcaaatcctgaccaggccatagtcgcagtacgcagaccaacacgcagcgcatcttcggtagtcatcagtgataccgcatacagttcgtcaatatcagcctgacgaacatccggcaaaatcatctgaagatgctcttcggttgcgggaataatttgaacatcgatcatcagaatcccccaacagtaaggcgaggaataacggcaagaacagacagcggcaacgggtcaagctgacggatttttacacgtccgtttttgccccagttactgtccagtttcacttctacttttccggtagcatcatcaacaggatcatcgtagaactcgaattcacgctgtggatattcgtaccatttaccgccaggcgtagtcgcccagatgccgcggctggcattcacaaccagagtaacggacgggatcacctgttttttgtccagcagcgtttcctgtccgttaatgttgatatccagtgtttcgaattcagcagttattggcaggccgatgtgcactacagcccccggagattccagcgtgacggcacctccggaaactactttctgtggttccacgttcgcatcagagagaatgtttacggtctggccttcaagatgagacaggcctccaaatgtccggcgcgccatctgccagttcgtggtggccacattcctgagggatggcgggacgttcctgttagcacgaaccactacagcggtattgctggttacagaaataatgtcgcaacgtaattcttttgacacttcatcgccagtaccaggatcagttccggtataagggaactgtagttgcgcgccgacatcactactggtgaagtacgcaccaccagaaacactgattgtatattccgcacggtaatcccattcaccagaaccaccagtgatggtcatcgttctgtcagacgtatttcttccatcatagctaaggccagaatcaacaaagaaagcatcttcatcgctggtaaataaacggctggacagccgctcgatgtatctcactgtttgcccgttaacggttcggttaacgacgaaatacaccgcatcttcattgccttcgctgatactgcatgtgctttcatattttccggtactggattgtggtgcccatgcaaaaacctgctgatcacgcaaataggtcatcaccagtaatttaccgtcatcacgaatgcagaaggcgctggagtaagggacaatcgagaagcaccagtcaacaatgctgtgcttctgaaaaagatgattggcaaggatggtcaggtcgttcccctgatagccgtcaacatcgaatgagtaggccagatcacggacaacactgcctttctcctggacgaacagagcaatattcgccacggcaattggtgggacattgctcgagccatttgatccctgagagctgaatgcaaatgatgatggggcaagcactttgttctggtcgccagtgatgacgtactcacctccggaagtcagcgccaccagcgaaccaacatcaatcaggtgacggatctcattaacctgacgcccggcataggtgtagataattctgtcgtcatcctgcgtaggattgcttttgccaaaatccttataatccccggtacggctggcccagatagtctgagggaacgcagtcgatgcggcgaagtaaaggcgttgttgataataaacaacagtgccaggataaccgttaatactgtcccaggcatatttagcccatttatagctggcattatcctcgccaactacctgcgaagggatataggaaatcacctcggcagttgcagtagttccatttgcagcagagatacgggcaatgccaaaaccactgtgcagatactcccactcaatgccggtatcatcatcaccggatccgccccagccatcccatgatgtgccttctgtatgcgaagggcgcaaagtgcctgttttgcctgctgtaacggcgcgatagtagttactgtctgcacggcgaatatcgccaatcgacgtactcttactggtttcccataccggcacagaatccactgcaggctgttccagatagaacaatttgcctacctgctccgcgccaaaaattgaggcgcttgccgttaacgtaattgtcccggtgctggcgctggcataaaccgtcactgactcgtcaatattgatatcttcaaatggcccgttcttcgttaccacatcaaccagttgccagttgtcatgcgcatagcggcgcaactctttcggcgggtatgccggatgaaccagcgtaagcacgtctgcgctttgcgtgaatttaattcggaacagatcggcttcagtatatggcgtggcaatttcataaataacattgctgctgttcagcaccaacgcaccatctttgataacgcgcatgtactggtgtccgaactccagagcataagtctgaaccgtcgagaactggaacgggattaggcggcatttccgatttgggtatttggcggcaccgacaaaacgcgtaccaggtcgattctcaacgccgccatactgccgcacgataaagttatcgcacttgcgcaatgccacctggtacttcgccatgtcgatacgaccgtacaacgacggtccaatctcaccaccggcaaagctgggctggatccaactgatagccatcaggacaacctcgcaatggtaaactcgtcaaccggtggctgtggttcctgtgattcattctggctatgcgagccagcactaagaatcacgcgattgtacatattgagggcaaacgtaccgaggtctgcattcccagtcagcgccatgttaatagctgccgcaagacgccaggccaacgcctccataaaaatggcatcaaacatgttcacatctgaaacgcgagagacatacttgagccatgcctgcggctggtctgtgtagatcaactttcctgttccgttggtgtctgcaccaacttcgtactgaacgcgcattgctgctgttggattgcgtacaccaggaagcataatttcagtaatgcgcagacaatcggacgggtactggtacgcatattcccagtcaggcggtggattgctcgtatctgcaagcgccacgcgtttggtagcaaagttccagtcaaaatcagaaagaacagcatcacggcaggcctcaaagtgcagcgaacattcacccgcttccttgctggcttccgtcaggctgttaatactgcggctgttgccaatattggacagcgcacgattacagatctctactacagaggccatcactcacctccgttaccgtacagagtttcagccgctgatttttctacatccctggaaacaggagcgatcgccatatcagtgatctgcagatcggcgctgcgattaacaccatcgtcagtttctctggcagacaggcctcgaataacagcctttgcagttatcatcacttctgttccgacgccctgaggttgcgccttcagcttattcaatgtgtcgttattaagagtgatgcacagcccccacgggtattcatcgcgagttctggtttctccgctctcatcctggtagctgtcagtgccggttttgaggtttacgagttccatatacactcctgcaataaaggggccgaagccccttgtctgattcgcgaggcttacacgcccagttctttacgcttatctgcgatcttctcgcggagcgtttcggctttggcgttatggtgtggcttctcgttaaagagcaattcgtactcttcacggagcttatccagttcatcatcatctgacacatcgttgatgattttggtgctggttgctgccattgacacctttcctgcaacttttgcttttgcctgtctggctgcatcgttaacaggttccagtgcgctaccaggctcaccttcgtattcgatttctgccccctccggccacagagtgttatggatatgagagaggcgcagaacgcggtatcttggtttctcacctgacatcgatatcaccttaaccagttacttttgagcggatcggatacggcgtattggcatcaacatcaagactgataccagcagtgaattcgccagccgttagtgggccggttgcgacggagtagttaacacgcagatatcgctgaacaccggcaggcacctttgcagaaacaactcgtttacctgctgtcagggcggtctttgccagtgcgccactatcataaatagtggtccatgagctgttattctcactcgtctgcaactggatgtttacagttgcattaccgcttgccgcggcggctgtgttaaccagcgcccaaaactcaagcgggtaacccacgccgatatcacgacgttttccgtcaattggaccgagatcgattacgtcagtagaagccgcggtattcgtaaccgcctgagcttcggagaacatcaacagtttgtcggtgatcatcttctttctccattagtgggtctgttacgacccacaggttaataacaggcgttacaccacgcgggcttctgtttccagaagcgcatcagtttcacggattggtacaccacggaatgaagtccaccactcgccttctgtctcttttacgctgatcgccagagatgttttctccagagattgcagatcaagagcctggcctacagtgcggttcatgtagaacaccgggcgacccatgccacgatttggaatgcgatgcagtgctttaaccatcaacttcgcaatatttgcggcagaggaaggttctgaaagattgctgacatcgatgtttgcaatgcgaacaacataacgccagtcacgcagagcaagtccgttatcccatttgtaatgggtacggtagccttcgtacttgccgccattaacatcttccagtgtcacctggcctttatcttccatctgaatgccagccttctgccctttcgggaagatgccatgcacggtgttttcgccccacaccactaaccagatggaggtgttatctgtacccgtgccaccagcatcaatgatgttctgagcattacccgcagacaggctggaatagcgggaggacagtcccataaactgctgagggttaacgctggaatcaccataaaatagcgtctgcgccatctgctgattcatcgcttcaataaatgcgcggtcttcagacaggcggaattcggcggtattgccgttcagatcagccagtgacttatcgacttcagcataggtttccagcatgccaacggaatcggttacctgcactgtggttgatttgcttggctgtacgccatagttcagcaaacgccaggtagctgaaggtaaaccagaacgaatggtggttcggtgtccggtaggaaggttcccttcgacaaaaagcatatcctgaaggatcgggttagtttgaccgagaagctcgataatcttatcgactttcccgtttggatcgacgcgcttaccccagtcagccagcgttagcgcagttaagcctttaacagccattgtcatttcctctcttatttgccatagagcacttcggccgcactacgctggccttcattaccaccggtgaccatgccatcttcagacatcgcctttccgattttcacgaacgttttgaccagatcagggtgattacccagcccggtggtgttcagatattctttgagttcaggtgtcccgaactggtcaagcgcacgctgtgcggcgctaaggttagaaatcaacttgtcgccaccgatttctttgtcagcttttacatcagcagcccactgctcggttgttttctgccaggcttctgcctggcgctgctgaacacctgccagaatcttcggataagcatcaaccagcttttgcgcttgctcgttggtcaggtttagttctcgcgccaccggctcgaattccttcaacgcttctgtatccagctctacgccttcggcagcctgaaactcgtacttctccggcgcaccatccggtttatcgccgtcctttttttcaccctgcttatcgctttcagactttttgtcatcagcaggtttatcgccatcagcaacaggttgcggcttatcaccttcttgttgtgatggatcaccaactggagcatggttatcacctgcaggcgctgatggttctgacgcagccggagctgctccaccatcgactggttgctcattgcaaagacggcgatacagcaaacgctcaaataaattcatgatcactcctgttcactggcctctttggccatcttcaaatactgttcagggcaatgcgccataacgcgctgaaacagttccagcgccagattgcgttgcccctcattaaatgccattgccatagcatccatcggagagatagcggaaaacacacggcctttctccagcacagaccagacaacgcgacgcccctgttcactgctcatgacaaagcgaatgtcatcaatttcacgctgtgccatgtcacgttgcttacgggcgttttcttctttcagttgatcgtcttcgtaatctgtcattgtgattgcccaccctgaccactaactgcattcgccatagctgacaaaacactcggatccgaagttttagcttcgcttagcgtcttggcaccctgtgccgccgccatccccatggccatcatttgttgctgctgttgttgctgtgcccgttgctggcgagcctgctcaacctgttcctgcggaacaatgacggttggagacactccggacatatcagcgaatgcatcgatcgcctgatcaacgttgagtttgtcgagagcttctggtttcgcttgcgcaagttgaccaatgaagttaaccgtggacgccagactggacaggccgatagacttctgcgcctgagccatgacggaaatgtattcgaccttcaggggcatgccttccatcgcgtcaggcggtggcggcaacatgtttttacgcaccatcatcgagaaagcgcggtcaatgagaggattaagacattcgtcgttcagacgctccagaaccggccccaacatcagaagtttttcttctttcatttcgatcaccgcttcaacaggcatcgagcgggtattgatgttctgcaacatcatgaacagatcgacaaagtaggcgctgttaatgatttgacgagtgtcctgaatgtctgccaccaaatctgctgtactggggttaaccagataagcaggcctgaaaccatcctgaccagtaatctgatcgatatacgtgatgtcgccaggaagaagggaggcacgctgattcttgagggaaatcggagcaaccatcggcggattggtggctttatcaatcaactgcgacttgcgcttctggagaagctgcaatgccttaacaggtccaagcgccagcatgcccgggcatgatgatccataaacatcttcgccgttaacttcccagcgcggagccataattggaaactcatcgaatccggactcacgcaacaacttgtcgttatcgccaccaacctcgtaataaaccgatttgaatggcttgttcttgctatccagcttcgatgtatcgcggtcaatgttcgggtaaaccgaatgcatcacttcaatccacttctcgtaggtgccgctttcccacatgctttttacggattcgctgacgttatttagcccgaactcctgaacaagctgacgaacagtcatagagaacttgcgaaaacaggtgtccacactgccacgaggtgagttagccaggtagtaactgcctatcgtgaatggcattgtgcgaatgatgtcctcgtcatcctccagcactgccattgcaccagtgctgtatgtgccgaggcttccgtataactgcggcagcgactgatagagattcgacttattgaacatatcgttcatgcggttctgcaccgcctcaagccacaacttaacagggccataatccatcatttcaggatctggcgtagccaggcgaaaccacggacgcgcggggcttgtgatgcctgacatcatgccgctggcgagagtgcgcgccgccatagtcccggtcgaatcaataatgcgtgtattgcgtcgatcgttacggttgacctcagaagtcagaaagcgggaaccacgcgggttgatgtaatcactcaactcgcgccagtgcggctcgaacgactgacgctcgctttcaagttgtgcgaactgtttgttcaatcgctctttagttgtttccgccatttcaatgactccggttactgaccaagcagcgttttaccgctggtattagcggttgatgtgtcgccctgagaaccggtaagcagcgtagaactacgaccagcagcagcgcgacggcgacgagtttcttcgtcgcgggcatcaacaacggcggcatcctgctcctgtggtgctgcctgaacttctggtgttgcaggcactgatggtgagctacccatgcacatatcaatgactccgtacgcaattaaattattaccaatttaaccacatatgatttatttatcgtaggtagttgacatttaacgcacgaattattacctttcaggtaagcatagagtgcattcctgttattaacctgactggcttgtcgttaaattgaacaggtggagtgagcttttattttgagcagtacggcgtatggcacatgcgccgatagcggtctggatacgtttaaggggcaccctcccttgctcgggcaaacgaaccaggtagccggaatgtgcaagtcgagcggttttatgccgcgcacggggattcaccatcccggcgattcggtgtgacgcctcggaagagacgagggtacaacgatgagagcatttatggagccgcgacaaagtgtggtgccttaacaggctaagtgctctcagcgttgtggcattagctcagtcggacagagcaaccgccttctaagcggttggtcgcaggttcgaatcctgcatgccacgccagaatcacgcctaaggaccgtgatgccagaagttccaggggcttggcggtgatggtttcccttgaaggactatcaccgccctttttacagcaggacgccattgcgatgacttcatgctgtaaacccgtacagccacggaaggcataactcattgcttccagttcgcccggttcgccgggcattttttaaggtgagattagactatgagtgacaaagacattgaatctgaaattcaggctaaaggtttagccgcgccgcgcgttacgccagaccatatcgagagcattattgctcaggaggcatatttcacagcagaagatggtgcctttggcgtagccataaaagcgaaacatactggcggagaggtaaactaccagccgcacgaatcactttctctgctgacgttctgcgtcctggtgctgcgcaacggcttcaccgtcaccggagagagcgcctgtgcaagcccggaaaactttgatgcagaaattggtcggaagattgcccgacagaatgctgtaaacaaaatctggatgcttgaaggttacttgctgaagcagaagttaagcgagcaataacaccgtgacatatcacaaacagccagcctatgagctggctttgttttatcctcatcagaggatatcaacgacattatcccctcaagcggattaagcatagggatcgtaatctgtgatggccttgccttgctggttctgctgcccgggaagtcgcaggcgctttgacaccgggaaagcaaacgtcagcagtagcgcatcgcctttaccaggcgaacgcccaagccgctccttgatatcttccttcggttcgataacgattttaccgtccactcgaactttgtactctgccgcagacaggtcgtccgctgtttcctggtcatccagcatgccgcccagcctcagccatgtcttgcatgagttgaacatctccccacgcttgttgagcatctgcgggtcagtagacgcgccaccgaacggaacaagttgccatgtacgaccccatccgtcaccgattgatttcagaccggttccgtaaccgaagtcgatgaacactgcgtcagcctggtactggtcttcaaagtcagcgatacgcttcgccattatcagatcgtcagtggtcttgttgccagtccacagcaccttactgtgcagcccctgccgcaggtatatcacagcgtcatcaacgccggagtatgccgggtcaacgccgattatcaccggagcgtgtgccacctgcgcagcagttaccacccgtttcattgcctcgtcagtaagaccggtagggataaactgcaattcagatgcatcaggaaatatgccgcgcacacggattttaacgaagtcgctgtcttccccgtagtcatcaacccatttctgtaattgctgcttgttagtaccttccaccgtccggctgtcaatctgtgcagttttccagcggtgtttatatttgcggaaacattcgcggaaacgcccggtgttacgcgtcgggttcccgaacgccacccagatgatttcggtgtcttcgtccgtaagcgcaccctcggcaacttcccacaccagatccgcaatgttcgacgcttcatcaaacaccacgatgatgcgtttgcgctcgttgtgtagtcccgcgaacgcctcagtgttgtgctcagaccaggggattgcgtcagcgcgccaccgcttgtcgtgcccagggtcattgctgtacatcgcggtagcggtacaggtaaaccagtctttcgtgatagcaagatttgaccacttgataatttccggccaggtcttcgttcgtagctggttgtcggtgttggcggtcaccaccaccttgcagtcctcgcaggtcgacatgccccagttaatcagcattgagatgaaagctgacttgccgatgccgtggccggatgcgcgggccagcatcaacggctggtgacgcgtcgccgggttctgcaggtgatcgcgtatctcgcggaatgcgtctgcctgccacttacgcggaccggtggcgtgcgccagctctgtgccttcctcgccccacggaaacgcatacagcgcatagcccagcgggtcatacgtgaacgaggcgatatcctcgacgagttgctcttccggcgacatggctgcggctgtcattcttcaccaccagcctgctctatgacgcggcgccgggcggcggccatgcggtcggcgatggtgaccgtgccggaaacctccaggcgctctttgaacgcgttaacgtcgacgtgcttaccaatcagttcgaggttcttcatcttgtcaggccatttaatttttttgaggattgtctctatcgaatcctcgttcatgttcatgatggtcgatgacagatcaaagccactaagcgtagtgcgccagattttcggccactcgcggattggcttaagactcccatcgtcgttgaggatatcaatcacgtccatctggtcgatctccaccaggcgcatgagaacgtaatcagcactgacgcgcattcgtttgttgcgctcctccatcagctcggcaatccgtttttgaatgcgttcatcgcgcatcatgacactggctttaactgccgctgtatttggggagaatcctgcgttaatcgctgcctgagtctggttttcaggcgttttgatgtatgactggcaataagcctcctgcattgctgttagtggcttaaattgcgttgatttgcgtttataggttttaggttcagcaggcatcataaccaccgtggtaatagttaccgttgtggtaatagtaccatgcaaaataaagccgccatagttggcggcagtattcaaaacccatcaaattcatcatgcataatctactcgtgacatgtcacactattaatttcgtttcatgccagcctttagtcacccagcattgcgagtcaccattacacgggcatgaattcacaggaactctctcgccgcacttaccgcaacgttttctgctgatcgattttatacgcccgtgcacgcgtgcatcatcctggcggatcagtaacgctatatactcaccaaattcgtaaggcgcacgcccggggcgacgcgtggcacagttacgctccagcatttcaatttcctgagcatcaagcacaatctccagcttacgcacaccagatgcagcttgtctggctctctgagcggctttgcgctctgctgctgatttagccattctgattttcctgcatcatgagaaatacaatcatggcggctcggagtggattattcgcatgaaagcaaatgttctcggcattaaaaacagctgaccactcaccgcgagattggtggcaggttagactgattttattatcaacaataataggccatgcatccgatggattattgcagtagtcaggtaaagggtttaatggctcaaaagttgtatcagcatttccgtaataccatttgttggtgttattccctgatgtttccggtttacatgcccaaaggcctttaaaaattatgtctcctaccattctgttaatttcaaaatcacttaactgtgaatagtccatcatttcgcctcctgcggcggttctggcagcggcatccagtacaaggcgttccctaaccacgataaagtgccgtcgctcaactccacgtattccccttgtacctgtcctgccatatactcgccgtgctttgaataaattaaaatccaatcatcttgagggggcattcgctcactacagcttatccaaccatccggagttaccggatggggtccagcgaactcgggcatgtcaggaccttttctgatagctttagccagctccagcgggtcatcgtaaagccagtcgccagtttgtgggtgatttgcttctgcaagctgcgcagcccattcaagaccatctttttgaccttggagataatcaagcggcaactcttcatgattacttgcaggttctgcactatcagcttcgcgccgcttctgtagctctgctgccatcgctctcacgacttcaactggtgcccttgcagcaaactctatgttggtgatcagctcattaagatattgctcgctgggatactgtttcttattggtaatagtggtcatgccgcgtttccttctttcttattaacaattacaccgtcatatatttcattaaggtgccctctcaactccatgcgccttaatgcagataacatgtaatcgcattcaacctgcttatttccagtaaatggcttatcgtcaggattaccccaacagcaattaccattgggccacccatgtactttccgtactcttccgttaataacgtgaagtaatccccagccgggaggtaaatcctcaactgaaataattcccggctcactaataaagaatcgccagtcgcccatgccaagtgagggatttttacggaaacgcttttttctatctgccaacaagtcagcacgagaacacttcgcctctatcaggcatgatgctgaatttctgaatcccatagcatctggctgttctccggtactggttacagcaacaaagcggtcatgaaagcaaaccttgaacccgttgcgcttaaggaacttgtacgcaatctgacagagttcgcggtgtgttaacgccatatcatcactctcctttgatgcgaatgcctgcggcgcggattgcagcgatgacttcagaaactttgtatgccattaccgtttggtaatcatcgtgaaaatctgttcgatgaagcatgctgctacgttccgggagcgatatttcccgagcatccagttccttaacgtgttcctccagttcgtagaccctgcattgttctctatcatcaatcagatataacccaagacattcgctttctacccaaccgccaaaatcatgatcgtaacgctcacatgaaaactcaccgtcaccgtcctttgttggaatggtgtaactatctaatgggccaccatatgtcggcacatttcccaatgttggatgctcaatccacatgaaaaatgcacgtccggttattgggcaaatatctggccgccattggttacgaacagccttggtttcggataattcttcagcgtgttgttttacttcctcaagctcaacgcgcagcttccctaccgtaagcgcaatatcctcgttctcctggtcacggcgtttgatgtattgctggtttctttcccgttcatccagcagtgccagcacggtttctggtccggtcagaaaagacttattgataaatccgtgattgaacgcagcagcaagacggcttgcggtgtagttaatcccctcgttgcgtgcctccgcacgtatttcagccaggaaagcgtcggtggctgtggtttcgatatcgttaatttcaggaagaatctcttcccatgtagcgatatcgccattcaaatgccacccggcaattccactggagttatccgcaacactccgaacggcttcaatagtttcatgcattgccgcattctccgccgccagcgccgaaaacttctcgtgtgccaacttaacagccgaatcagcctgcttaattgactcaatcgctttctgctggccttcggccagcgcattagcacgcgccagttgcacttccagttgcgttgccaaatcgctgagcagctttgccacactgcgcatatcaacggcaccacattcagctttcagttccgaagccatctcatgcccggcggcaactaaccctttgatattactttccatctttaccctcgcttatccacataacttattgattacattgataactaaaaagatcgtcgattcagaattcttcgatgttccagccaccacctgctttctttggtttaaccgttaccccgatgattcggaacggatactgatctgcggctactttggttttcaccctggcgtcgtcggtccagaatccccctttcacttcgtgcagttccatctctccggtggcgagcatcacagcaaaatcgggcgtatagaacgtgttgtcggctaaccgcagcttgataccctcgaatcgataccaggcgatttcccctgcgcgtttacgctgctcaaggtgctggcaatacgcagattctgttttgttcatctggcctgttttgagtcgaccaagagcctgtatctgttttctcatgatttacccttgaggtaattaaaaaccacataagacacaaaatcaatagagtttagaatattttattacccaataggtaattattgagacgtaaaaaaatgcgctatcgcgctggtattacttgataaatcctgccgcctttccccgcctgtattcctccatcagccactgcgccggtgttattccccccagggtggcggcgttaggcatgcacccgaaacttcgccctggtggatggtaaacgtctctccctgtgtccggaggcgtactcatgggttctggctttgcctgtatgctgatcaccggatcgggtatctgctgtccggaagccacctttttcgcccaatcatcgagcagcctgcgcgcgtgtttctcaacctcaatctcgctaagctggcgctgatacattgcgcggcgggtatcacatacaacccagtacataaccggatgtcgccacgggaatctttctggaccaccaggatataaacttttttccttgctgtaccgatgaaactccgccatcacatcgtcaatggtgacgccaagaaccatcttgctgtctttgcaccacttgatgaattgcccaggcgacggccagaacggagattcactggcgcgggcgtggcgcataccagcgttaacctgttccattgtagtgatcccattctccagaaacgcaagcatccattgttttcgaaattcgtttagctttccctgttcgctgatagcagcgatgctgcctggaaatgcagcctgcaactggacaaacatttcgttgaaaattcttgcaacctgctccttctttgccctttcatcgtcagcagaagcaaccaccgtcgagtggtcatgcccaccacgaaagcgatagtactcattaagaagttctggagttgatttcatcccacacctcatctatccagtcagtgttatgccagtcaaggctctttctgacttcacctgatttctgtctacagaactggatgcgccttgccagcttctgctcccactgcgcctgatggtatgccttaccctcagccatccagtaaattctgaactctgcaagttcctgtgccgttggcagactgtccaggtagatcccctgcaatgagcttttccgaagaaagtcatctgatggctgccattgttcatgcatgacaaatttgcctaattgccctggcccaccaggaggaacaaagttattcatcacggcgttgtttgcgccggggtcatgaggcacagaatccccgttttttgtcctgctctccctctcttggttaaatgactggttatatgactggttctggatcccgtttttgggatcattcaacatcccgtttttgggatcattcaacatcccgtttttgggatcattcaacatcccgtttttgggtatattcccgttttcggtaacattaccgttttcgggttcattgcccccctcccggttgcctttaatgttcccgtttttggttatattaagagagaaaacccgcactctttttgtcgctccctttctctctccggtatctgaaataagccccattttcatgagcgatataagcccggcctgcacggtttttttattcagacaagtgtctttaacgagacgttctatgctggggtagcagaggttatattcatcggctctgtcagccatcgagagcagtatgagctttaatgacgagctacctggatctgtctcccaggcccaatctgttgcatgtctgctcatgattaatctccgctatcagcttgaatgttgtggggaggaattaatcatgatctgcttaatctctgccctgatgcgacggtttgattccatggtgcactcaacacagtgtccgttgtaaacccagcgttcactgtcatgtccgtgcttacatggttttccggtgtagtagcgtttaagtccgcgctttgcggcatcaatacgtgtaatgatttccatggtaagccctgttattagtattgggattacggtcattttgtgctgacacaaaaaaaagatcaaccagatttggttttttattacctttgaggtacgaatagatatgaaaagaccgccgggtggcggtctacagagggttgtagctggatatcatgagtagaagaagtatgccagttctgcttttgagcgcagccattgtcttgttttacaggctttaaaaagcccattcatcaatactttacctggcattttgcgcttacctgttaagtgagtatggatatagtgactcgtcgttccggcttcctgtgcgaaggcttcacgctcatccggagtaagtgcaagccagtgctttttgaaatcgaaatgtccgttatcgctcatagctattgcctgatatttatttcagataataaatattcacccataaggtaacaaaaatcaaggatagttacctatgaggtgcatttacctgttgggtaatattgctttaaattgaatcatctactgattcatatatgagacgattttccagaaaatgaaaagtatccaggacgtccgcaggcaaaatctcaacgacttgatcgaccgtgaattcaatggtgttcagacgcggatggcagaaaaacttggaactcaggcaaatctggtaaaccgctgggctcttggcaagaaggttatcggcgaccaagttgcacgaaaaattgaagctgccgccaataaaccccgtaactggcttgatatcgatcgctcgctttctcaggaaggttttcagcctgtcggcccaagcgacattggccagctggcggctcacaacctggaacgctggatgagcgaaagccgcgacctttcaacacagggaaaacttcaccgcgcatccggcgtagcccaggtgacaatcagccgcctgttaaacaatgaggtcagcgtttccatttccaccctggagaatgttgcatccgcattcgggcgtcacggctatgaattactgattcacccgcacgaccctgcgaccatcaactatgatcgctcgcgctacgcattgttacccgaaaccgagaaagcaaagatcgaaagttacattgaatttgtcatcaaccagaacgaaaaaaacaaacaataaaaccatatttttcagtaagtaagccgccttatggcggcttttttattgcctattcgattacctaacgggtaatttttttaactcatatctattgacatcaaaccatatacgcataattattacctcaacggtaacagaccgaggtaacaagttatgcagtggaaaatcatcaacggttggtactgcgttactgcatgcggattcatgagctggaagttccgcaccttacaggaaggcattaagtgggctttcgtcagcaaagaagctcgcgatgtggccaacgataacgagatatgggagggctgataatgaacgttaatcagcagaaaaatcttcaaaaaatcatgctggcattcgacaaggactaccgcctgtcagaacagctatatgaccgacaagttgaactgattgagagtatccggcttcatcaactggcatcaactttcgacgttgtaacagttaaaggcgttcgccaggaagtactggaggccgctaaagacagccctgagttcgaagaactaatggatgcctaccggcgcgaggcaatggcaattatcgcccgctgggatctggctgatcagattgatgggcagagggacgcggcatgaatccgggaatttatttcgatatcagcaacgaggactaccacgccggtgacggcgtgagtaagtcgcagctagatatggtggctaagaaccctgcccttctgaaatgggtgaaggctgctccggaagacgaagagaagaagtctgcactggatatgggtactgctctgcactgtctgcttctggaacctagagagtttgacaaacgcttcatcgtttcaccgaaattcgatcgtcggacaaaacaaggtaaagctgacgaagaggcatttattcgtgatgtagcggatatggggatttcggtacttgatgcagagcagtggcgaaaactggagctgatgcgtgatagcgcaatggctcacccggcggcacgctggatgctggaagcacctggttactgcgaagcatcaatgtactggaacgatgaagagacgggtgagttgtgccgaattcgtccagacaaatggctgaacgagcacaacgtaatcgtcgacgtgaaaaaggttgcagatatggatcgttttgctcgccacatcgaggaattccgctaccacgtgcaggacgcaatgtaccgtgaaggcgcaatgagggttactggtcagccgcatggttttttctttcttgccgtgagcgaaagcattgattgtggtcggtatccggtacgcgtgttcgagctggatgcgaaggatgtcgataccgggcacgctctgttccgccgggatctgaatacctatcacgaatgccgcatcaatgatgaatggggtggcgtggaaattattaaacgccctgactgggcacgtaaacaggatatgtacatatgagcaacaacatcgcaaacatcaacgcaccagtagacacagcaatcgctggcactgctgcaactattttcagcccagacggcttgaaccaactgatgaaattcgccgaggtaatggcgcaaagccgcgtaacggtaccggcgcacctcgccgggaaaccagctgattgcatggccgtggcaatgcaggctgcgcagtggggaatgaacccgtttgccgtggctcagaaaacccatgttgtgaacggcacgctaggttatgaagcccaattagtaaacgcagttatctcaacaatgtcgccaacaaaagatcgcatcaactacgagtggttcgggccgtgggaacgcgtgatcggtaagtttgttgagaaaacatccaaaaacggcaatccgtatatcgcaccaggctggactataaaagacgaagaaggctgcggtgttcgcgtatgggcaaccatgaagggagaggatcaacctcgagtgctcgagttaatgctgtctcaggcacaggtaagaaactccacactttgggccagcgatccgaaacaacaactcgcataccttgcgacaaaacgctggtctcgcttgcactgtcctgacgtaatcatgggcgtctatacacctgacgaattacaggaaacggcaccgcgcgttgagcgagacattactccgcaaacaactacggctgcgggaattaatagtctgatcaacgctaaaacagtgaaaaagcctgatgagcaaacgcgtaaagcggatagccgtgatccagaagaaatgctgatggcctttaccagcgcagcgatgaattacagcactgtctccgaactggataaggcttacaaatacattgcacaaaaactttcagatgatgacgaactgctggcaaaagccaccgacgtttacagcgttcgtcgggaagaattaaacgaaacatctatgtaaccaccaccgcggcgccacgcgcgccgcactgcaaccaagagaggtatttatgaaaggtgcattaggtaagaaggaactcctggcggtggtgccactgtcatggagcactatcgaccgtatggagcgcgcaggggaatttcctaaacgctggtatatcactgacaaacgctgcgcatggaaccgtgacgaagttgagcgttggcttgatgaacgtcaggcagcaagcccggcagagttccaaggtaaaaagcctcctgttcagcaacgtgtatatcgtcctgtgagcaacgctgcatgagtgcgctgctaaggcactggagcaaatggtcaggatggtacttattcctggcctctgtttcagcatggctttatctgctggcattaattttcagagagggttggattaagtgagaaagttaagccgacttgaaaaatatcacatgaacaaggtttcaatgcgcagtccgtcaaagattgtcgccgttactcctgcggcgatagagatcgaaaaacgcgcgattgaaagagagaaaaaagggcagttccgcattgccgctcacctttggcttcagtgtatggatgttgcttctggtgatgttgagcgtgcaaggatcgcggttcgcagggaccaatgtatcacaaaaggtaacggccttcgccgtggcgactatagcggcataggatgttgtggggtggtttatgactaagaaatacacactaatctatgcagatccaccctgggtataccgggacaaagccgcagatggtaatcgcggtgccggctttaaatatcctgttatgagtgtgctggatatctgccgccttcctgtgtgggatttgaccgctgaaaactgtctgttggccatgtggtgggtgccaacacaaccactcgaagcactaaaagttgttgaagcctggggatttcgtctgatgacgatgaagggcttcacgtggataaaatgtggtagccgacaaccagataaactggttatgggtatgggacacatgactcgcgccaatagtgaagattgcctgtttgcggtaaagggaaaactacctacgcgcattaatgcagggatcgttcagtcatttaccgcaccgcggcttgagcattcaagaaaaccagatatcgttcgtgaaaaacttgtgcaattgttaggcgatgtttctcgcattgaactgttcgcccgccagtcgtctcatggcttcgatgtttggggtaatcagtgcgaagacccggcagtgcaactacatcctggatacgcgttggatattggcggattaacaaatgcattcagcaatgctccgctgtcaccaacagacaaccaggggcgggagcgtgcagcatgaacagggcatcaccagcagatttaaggaaatgccttgaaactgcaaacatgcttgcacacagcgggatcaggtttgttccaattcccgctgtcactgatgctgaatttgcaacgctgtcagcaatattcgcagacaaaattgaatcactggcagcagaagccgagatggaagaaaatcagcagaataattaaacgttattcccccgccatccacttctcaaacttcgacggggagaacggaatcagatccgtatgctccccgttaatccaggaatcaatcatatcggcccactgctgcaacatgtaggcgcgctgtctggcgtattccgctttgttatatacggcgcgcacacctttctgctcatgtgccagagccttttcaatccagtctgaaggataaccagcctcatgcaacaacgtactggctgtacggcgcatatcatgtacagtgaagtcctgaatatgctcaccatcttcatttattattttcaccgttctgtcgatcagagagttcagcgcggcattagataatggcttccggaaattgtaacgaccaggaaccagatattcacttccaccagcgcacatctgcaacccgattaatatatcctgtgcctgtttaggcaggtaaataacgtgcgcccgacttcccttcatgcggtctgaaggaattgtccatgtccattttttaaaatctatttcatcccacgttgcattggtgaattcgcctttacgaaccatagtgataagcaccagctttaaagccattttcatagtgcccatagcaccaatggcatccagcatacggaagaacagaccaatttcttctggtgtcagtgttcgctctcgtggtttaaatatggcgatagacgaaggtttaatgtcagccgcaggattaaacaaaccatgaccacggtcattggcgtgacggtatacgctgctgatgatctccctggcctgtactgctgttgcccggccaccgcgttcgacaatccggtcacataaatcacgaaccatcgatgtggtaatttcagccatcattttgttgccaagaaccggaagtatgtcacggtcgatcaccgcctgtttcattgcgcgggtactgtcagccaggatgacgtgtttcatataactgtcggtatgtaccgcaaacgtctcggcaccacgaatctttttgataccgtcacgtttagccgcagccggtgactggcctgctttaagcagcttctttgcagcaatcagttcttcccgcgcttctgccaggctgataccgtcacgcccatactgcccgattaccagtgtttcgcggcgaccgttgatacggtagtcatagcgaaatgagaccgtacctgacgtaagcacagctacatacagcccgtcacgatcggagactttgtacagtttgtcctgcggcttgaggttttttaattttgtatcggtaagcacaattcacccgtatagaaaccattttcatgacggtatgagagtatacctttaaggtaataccgtcacctgtaccgccgaaaaatatggtgtggagtgaatagaaatgaatacataaaaacaaaaaccctctgtaaaaacagagggttgaattagtatctgaataggaatgagttgctatgagttagctgttaatcattcccactcaatggtagctggcggcttgccgctgatgtcatacaccacgcgggaaataccgttcacttcattgataatgcggttggaaacgcgaccgaggaaatcgtacggcagatgcgcccagtgtgcggtcataaagtcgatggtttcgacagcacgcagagagacaacccagtcatacttacgaccatcgcccattacgccaacggaacgtaccggcaggaacacagtgaacgcctggctgactttgtcgtacaggtccgctttacgcagttcttcaatgaagatggcgtcagcacggcgcagcaggtcacagtactctttcttcacttcacccagaacacgaacgccaaggcctggtcccgggaacgggtgacggtacagcatgtcgtacggcaggcccagctccagaccaatcttacgcacttcgtctttgaacagctctttcagcggttcaaccaggcccatcttcatctctttcggcaggccgcccacgttgtggtgagatttgatgacgtgtgctttaccggttgcagacgccgcagattcgataacgtcagggtagatggtgccctgcgccagccacttcacgtcttccagtttcagcgcttcttcatcgaatacttcaacgaaaacgcgaccgatgattttacgttttgcttccggatcgttttcgccagccagcgctgacaggaagcgatcttctgccggaacgtgaacaatgttcagaccaaagtgatcgccaaacatatccagaacctgctctgcttcgttgaggcgcagcaggccgttgtcgacgaatacgcaagtcaggtttttaccgatagcgcggtgcagcagcattgcggttacggaggaatccacaccaccagagaggccgaggatgactttatcgtcgcctacctgctcgcggatgcgagctacagcatcgtcgataattttcgctggcgtccacagggcttcacactggcagatatcacgcacaaaacgctccagcatgcgcataccctggcgggtgtgagtcacttccgggtggaactgtacgccatagaagcgtttttcttcgttagccataatggcaaacgggcagctttcggtgctggctacggtgatgaagtcggacggaatagcggtaactttatcgccgtggctcatccagacatcgagcagcggtttaccgtctgcggtcagcgcatcttcgataccgcgaaccagtgcgctgtcgtttacgacttcaacctgcgcgtagccaaattcacgttcgttagaggcttcaacgtgaccgcccaactgcattgccatggtctgcatgccatagcaaacgccgaataccggtacgcctgcttcaaagacatactgcggcgcacgcggactgttttcttcagtagtactttccgggccgccggaaagaataatgccgcttggattgaagtcacgaatttgtgcttctgtcacatcccacgcccacagttcgcagtaaacacccagctcacgcacgcggcgcgcaaccagttgagtgtactgagaaccgaagtccagaatgaggatgcgatgcttatgaatgttttccgtcattgacgcttattccgaggcaagtgaaacagataatataaatcgcccgacatgaagtcgggcgaagagaatcaggagcccagacggtagttcggggactctttagtaatggtcacgtcgtgaacgtggctttcctgaatgcccgcaccgctgatacgtacaaactccgctttagtacgcagttcgtcgatagtaccacagccggtcagacccatacaggagcgcaggccgcccatctgctggtgaatgatctctttcaggcgacctttataggctacgcgaccttcgataccttccggcaccagtttgtcggcagcgttatcgctctggaaataacggtcagaggaacctttggacatcgcgcccagggaacccataccacggtaagatttgtaagaacggccctggtagagttcgatttcacccggagattcttcagtacccgccagcatggaacctaccatcaccgcgcttgcgccagcggcgatagctttggcgatgtcgccggagaagcgaataccgccatcagcgataaccggaataccggtgccttccagggcttctactgcgtcagcaacagcggtaatctgcggaacaccgacgccagtcacgatacgagttgtacagatagagccagggccaatgccgactttaaccgcactgcaaccagcttctgccagagcgcgtgcacctgcagctgttgccacgttgccgccgataatttgcagatccggatatttagcacgggtttcacggatacgttgcagtacaccttctgagtgaccgtgggaggagtcgatcagcagaacgtcaacgcctgcggcaaccagcgcgtcaacacgctcttcgttacccgcacctgcgccaaccgctgcaccaacacgcagacggccttgctcgtctttacaggcgttcggtttacgttccgctttctggaagtctttcacggtgatcatgccgatcaggtggaattcgtcatcaaccaccagcgctttttcaacgcgtttttcgtgcatttttgccagcaccacttcacgggcttcaccttcacgcacggtgaccagacgctctttcggcgtcatgtaaacgctaaccggctggttcaggtcggtaacaaaacgcacgtcacgaccggtgataatacccaccagttcgttttcttcggtaacgaccggatagcccgcaaaaccgttacgctcggtcagttctttcacttcgcgcagcgtcgtggttggcagaacagtctgcggatcagtcaccacaccagattcgtgttttttcacacggcgaacttcttctgcctggcgttcaatggacatgtttttgtggataaagccgataccgccttcctgagccagagcaatagccaggcgcgcttccgttacggtatccattgctgcggaaagcatagggatattcagacgaatagttttcgtcagctgggtgctgaggtcagcagtattcggcagaacggtagagtgagcaggaacgaggagaacgtcgtcaaacgtcagagcttctttagcgatacgtagcatgggcaatatctcgaccagagtggttaataaatattgccgcggcattatacagagcgtaaccgattgcatctacccctttttgcaaaaaatgcttgctatccccgaagggcgggttactatcgactgaataacctgctgatttagaatttgatctcgctcacatgttaccttctcaatcccctgcaatttttaccgttagtcgcctgaatcaaacggttcgtctgctgcttgagcatgagatgggacaggtttggatcagcggcgaaatttctaatttcacgcaaccagcttccggtcactggtactttacactcaaagacgacaccgcccaggtacgctgcgcgatgttccgcaacagcaaccgccgggtgaccttccgcccacagcatgggcaacaagttttagttcgcgccaatattacgctctacgagccgcgcggcgactaccagataatcgttgagagtatgcagccggccggtgaagggctgctgcaacagaagtacgaacagctcaaagcgaagttgcaggctgaaggtttgttcgatcagcaatacaaaaaaccacttccctcccctgcgcattgcgttggtgtgatcacctcaaaaaccggtgctgcgctacatgatattttgcatgtgttaaaacgtcgcgatccttctctgccggtgatcatctaccctgccgccgttcagggcgatgacgcgccggggcaaattgttcgcgccattgaactggcgaatcagcgcaatgagtgcgacgtattgatcgtcgggcgcggcggcggttcgctggaagatttatggagttttaacgacgaacgcgtagcgcgggcgatttttaccagccgcattccggttgtcagcgccgtcgggcatgagacggatgtgaccattgccgattttgttgccgatctgcgtgcgccaacgccgtctgccgccgctgaagtagtgagccgtaatcagcaagagttactgcgccaggtgcaatcgacccgtcaacggctggagatggcgatggattattatctcgccaaccgcacacgtcgctttacgcaaattcatcaccgattacagcaacagcatccgcagctccggctggcacgccagcaaaccatgcttgagcgcctgcaaaagcgaatgagctttgcgctggaaaatcaacttaagcgtaccgggcaacagcagcagcggttaacacagcggctgaatcagcaaaatccacagccgaagattcatcgcgcgcaaacgcgcattcagcaactggaatatcgtttagcagaaaccctgcgcgcacagcttagcgccacgcgtgaacgtttcggtaatgcagtaacgcacctcgaagccgtaagcccactgtcaacgctggcgcgtggatacagcgttactactgctactgacggcaatgtactgaaaaaagtgaagcaagttaaagcgggtgaaatgctaaccacacgtctggaagacggctggatagaaagtgaagtaaaaaacatccagccagtaaaaaaatcgcgtaaaaaggtgcattaagccagcacgaattcaacgcgttttttcgatatcaagccatgcccgtgctgacagaagtaatctactgcaccacaggcttttaacacctgcaacggttgatggcagtctggacaaagagctttcatttcaataaattccccgcaggatcggcaacgcgcatggccgttatcctgatcaagcacatgctgacattgtggacaatgcagttccatatgaattcctccggtagccattccctctacattcatagagggaatggcagataaaatacttacggataattatttatttttcttgatgtgcttcatcagacgcttacgtttacgcatctgggttggcgtcagggtgttacgcttattcgcatacgggttttccccttctttgaactgaatacgaatcggcgatcccattacgtccagcgatttgcggaagtagttcatcaagtagcgcttgtaggaatcaggcaggtctttcacctgattaccgtgaatcaccacaatcggcgggttataaccaccggcgtgggcatatttcagcttcacacgacgaccgcgtaccagcggcggttggtgatcttcaacagccatcgtcatgatgcgcgtcagcatagaggtccccacacgacgggtggagctgtcatacgcttcacgtactgattcaaacaagttaccaacaccactgccgtgcaaggcagagataaagtgcacacgagcaaaatcgataaagcccagacggaagtccagcgtttctttcacctgctctttcacttcctgactcaggccatcccacttattcaccacaatgacaagtgagcgcccactattgagaataaagcccagcagcgagagatcctgatcggaaataccttcgcgcgcatcaatcactaacatcaccacgttggcgtcttcaatggcctgcaacgttttgattacggagaatttctctacagcatcggtgattttgccgcgtttacgtacgccagcggtgtcaatgagcacatactcacgtccatcgcgttccattgggatgtagatgctgtcacgcgtcgtgccaggcatgtcgtaaacaacaacgcgctcttcaccaagaatacggttagtgagtgtagacttacctacgttcggacgacccacaatcgccagtttgatcggcagactttgcgggtcgaagtcgtcttcctcttcttcttcgccgttctcttccgcttcaaattgcgcccagtattcagcgtcttcgtcgacttcctcttgcggtgcgagatcttccatccacggcagcagcacatgctccagcagacttaatacgccacgaccgtgagacgcggcgatcgggtagatttcacctaaaccaagcgagtagaaatcaaccactgcctgatcgggatccagaccgtcagttttgtttgccaccaggaaggtcggtttttcacgggagcgcagatgtttggcaatcgcttcatctgccggcatcaggcccgcgcgcgcatccaccataaacagtacgacgtccgcttcttcaatcgccagcagcgactgttccgccatgcgggtttctacaccgtcttctgtgccatcaatcccgccggtatcaatacagataaactcacggccttcaatttccgcacgaccgtacttacggtcacgagtcagacccgggaaatccgcaaccagcgcatctcgggtgcgagttagacggttaaataacgtggattttcctacgttagggcgcccgacaagcgcgaccacaggtaccatgtttaaagcctcatttttataaatcatcagacaacgcacgctatattcgcgtcgttgttaaaaacaggaaaacggcccctgtccaggagccgttttcaaagtgaacgacagagacgattaacgtgtaatagagtacacggttccgtcttttgcctggatcagcagtttgccgtcagcggcaaccggttcagtctggaaaccggaactatcaactttttgctgggcaacgaaacgaccatcttcgacgttaatccagtgcagataaccttcactgtcaccgaccaccaggttgccattatacagcaccggagaagtcagcaggcgatgcagcagatcgctttgtgtccacagcgtaacgccgccatcaatggtcaacgccatcacccggtcattttgatcgaccagatagatgcgattgccgtcgacgatgaaatcattcaccgaacccagttcgcgtttccacataatctgaccactgcgcagatcaagcgccgtcaggttaccattataggccagcgcgaaaacaacgccgttaacaacgacgggagtcgtgtcaacatcgctcagacggtcaatttcggtagaaccggtcgcctgggaaatacgctgctgccaaatcatctggccctgttccatcagcactgcgctgacgcgaccattatcgccccccacgacggccgcaccaaaagccgttgccggcgcagactcgccacgcaaagagagcgaaggcatatcgaggttaactgtccatttgacagcgccgtcagcttcgttcagcgcttgtaactgaccgttactggtgtggattaacaccagaccgtcgctgaccaccgggcgcgaaagtgcttcacccgcgactttagtttgccatgccacagtaccatcgctggtattcagcgcgtaaacctgcgccttttcgctgccaatgtagacatgcccaccagacacggtcacaccgccagaaagtaatgcaggctctttagagaaccagccatctttctcggccaggctgacagaccagatttctttgccatcatccgcattcagcgcttttactaaaccagcgcggtccgctgcatagacaacgttgtccgccagtgccggatgaagattggaatagaagttgccaatgccgctaccaacggaagtgctccacgccgtggtcggcgtaaactggttttcaacggttggcaatggggacatctttaccacatcttcttcgctgttaaacagcgaacagccgcttaaaagggtaacggaaagcagtcctggcagcagtaatttacgcaattgcatcgggtccctctcagatggacaaattattaattttcatctgcatcatttcgctcagtgccggagtaacatcgcttttcacgcctgcttcccatgcactacgcgcaccttgcttatcacctttgctcagcaatgcttcaccacgcaggtcggcaacaatggcagcccacccttcacctttgatggtatcaagggttttcagcgcggcatcagcctgcttgagctgtacctgaacgcgagcaagacgcagatttatcacggctttgagattttcatcgctcgtgtctgccagcccctgttgtaactgggcggcagctttctctagttcatttttgtcaacaaattgctgcgcaagttccaaagaagccagcgcaccataagtatttttattttcagcagcaaatttttccgccgccgggatgctatccggtttgccttcgctcactgcggtaaccgcattttgataggcaagagaagcggagcgtgcagaatcaacctgatggctgttccagtagcgccagccaatcagtgcgccaacgcccaaaatcaccccaacagccagtgctttgccattttcagcaaaaaagcgtttaaccgcttctacctggtcgttttcgttctcgtaaatttccacgctgtccttctccttccttaacccagtaacgtgcgcaaatgcgcggctacgctatcctgcgcaactgccgtttgctcaccagagcgcaaatccttcactactgctgtgccgttagccacttcagactcacccagcaccacagcaacgcgggcaccccatttatcagcacgggcaaactgtttcttaaagttgccgccgccgtggttggtcatcaatttcacgcccggtaattcatcacgcagacgctcagctaatgccatagccgcagattgtgtatcagcacctgaagccaccaggtatatatcgacaacaggatcggctttaaattccggattaacggcctgtactaacaatacaagacgttcgaggcccatcgcaaaaccgacagccggtgttgcacgaccgcccagttgttccacaagaccgtcataacgaccgcctgcacacacggtgccctgggagccgagactgttagtcacccactcgaaaacggtacggttgtagtaatccagaccacgcaccagacgctggtttacggtgtaagcgatccccgcgctctccagcagtttgcacagaccggcaaaatgctcacgagattcctcgtccagatagtcacctaatgccggagcgtcgttgagaagcgcctgcacttccggattttttgaatccagcacgcgcagcgggttagtgtacatgcggcgtttgcagtcttcgtccagcttttctttatgctgctcaaggaatgccaccagcgcatcgcggtaattggcgcgtgcttccagcgaaccgatagagttcagctcaagagttacgtgctcggaaatacccagcgcgcgccaccagcgggcagtgagcataatcagttcagcgtcgatatccggaccttgcagaccgaaaacttcgcagcccaactgatggaactgacgataacgccctttctgcggacgctcgtgacggaacatcggcccgatataccacagacgctgttcctgattgtacagaagaccatgctcgatgccggcgcgtacacagcccgccgtcccttcagggcgcagagtcaggctgtcgccattgcgatcctcaaaggtgtacatctctttttcaaccacgtcggtgacttcaccaatcgcacgtttgaatagcggggtctgctctacaatcggcaagcggatttcactgtaaccgtagctgccgagcacgtttttcagtgtgccttcaatgcgctgccagatggccgtttcgccaggcaggtaatcgttcatgccgcgaatggcttgaatgttttttgccacgtttattctctttctgaatataaaaatgaaccctcaacgcttccctcaatgtttcgggagccatgcgggttcaatcatacacgggaagcgaggcgcttcccatcacgttattatttttcaacctgctgaacgtcaattcgacgcgcttcgtccagctgactggctttcgcacgaatgcgtgcttccagctggtcgatcatatcgttgttgtccagacggtctttgcgcacgccatcttcatagaggccgcttttcttgttgccgccggtgacgccgagtgtagaaaccagcgcctcacctgggccattcaccacgcagccgataatcgaaacgtccatcggagtgatgatatcttccaggcgttgctccagcgcgttaaccgtaccgataacatcaaattcctgacgcgaacaggtcgggcaggcgatgaagttgatccctcgcgaacggatacgcagcgatttcaaaatatcgaaaccgactttgatctcttcgaccggatcggccgccagcgatacgcgcagcgtgtcgccgatgccttcagacagcagcagacctaaaccaatggcggattttactgccccgctgcgcgcaccaccggcttcggtgatccccagatgcaacggctgatcgatctgttttgccagcaaacgataagactcaacagcgaggaagacgtcagacgctttcacgctgactttgaactgatcgaagttcaggcgatcgagatgatcaacatgacgcatggcagattccagcaacgcctgcggcgtcggttcgccatacttttcttgcagatctttttccagcgatccggcgttaacgccaatacggatcggaatgtttttatcgcgcgcacagtcaaccaccatgcgaatacgctcttcattaccgatattgccagggttaatacgcagacaatcgacgccgtattccgctactttcagcgcaatgcgatagtcgaagtggatgtcagccaccagcggcacgttaacctgctgtttgatgagtttgaacgcttctgccgcgtccatcgtcggtacggatacacggacgatatcagcgccaacgcgttccagcgccttgatttgattgaccgttgcttcgacgtctgtcgtacgcgtattggtcatggactgtacggcgatgggagcaccatcgccaatcggcacattcccaacgtaaatacgtgttgattttctacgttgaattggagcctggttatgcatgaaaaatctcccgcgttacccgtctgttactgcgccggtgattgttcggcattgagggtcagacgcgcaacctggttagttctgataaaacgactcagatcgacaggtttcccttgatactggatctgtactgcggctggcgcaccaattttcagtttgtacggtgcctggccggttaagttcaaattaccgtctttacgctgcataccgctaaacaattttttaccggtagcatcagtgacctccagccagcaatcggcagtaaagttcatcaccagcgcattcggatcagccaccggcgtggtcacgccagcctgatcggttggcaacggcgcagcaccatctggcgttgttgctgccgttggtgccggggtcgcggcggtatcaacatttgcctgcgaaggcgaaacaaccgcattctgttgcggatcaacagctggtgctggcgcagttacggcaggtgtttgcgtgttggttgcggtagtatccacagacgctggcggcgtggacgttgtagccgggtctgtagttgtcgacgtatttaatggaacactctgcccctgctcgctattactgctcagttccgccgaagattgatcggccatagtggtgatctcttcctgctgagctttgtggtcttgccaccaccaggcaccgctcaggccgataaccacaaacaacaccagccaagtgaaggtcatcagccagccgtcgcgttttttgcggcgtttaccgagggaaaaactctgcatcggcgcaacttttgcagcccgaagtggagcctgcttttccagccctggcagcagttcttcttctggaatatgtaccagacgcgcataagagcggatatatccgcgcaggaatgttgaagcaagatcggcgggtgccttatcttcttcaatgtcgcgtaccgtggaaaccttcaggcaaagtcgctcggcaacggcctgctgactaagtcctagttgttcgcgagcattacgcaggcgagcgccggtagtaagtgcttcattttggtcgtgcgtggcttcagtattcattcgctgcaggtacgtttaaatgagaattgagatgccggtgaaccatcatgctcacccacaccgcgaaacatccgttaagttaaccgttatcatacagtataagaccgtctgtgtgctcgtgacaaagcccacattcactaaggctaacttactgttgcatcgttacatactgccttaaagtcagcaaaaacgcaccgttaatattgaccagacaattgcaacttaatacttcattcataaaacattacgccacggtacataaagtaaccgtggcgtaatggctatcagaccgctttaatgtcgatggcttcaccctgcatccgtttacgcagggtacgtttcgtacggtcgataacatcgcccgccaactgaccacaggcagcatcgatatcatcaccacgagttttacgcacaatagtggtgaaaccgtagctcatcagcacttttgagaaacggtcgatacggctgttcgagctgcgtccatacggcgcacccgggaacgggttccacgggatcaggttgatcttacacggcgtatctttcagcagttccgccagttggtgcgcgtgttcagtgccgtcgttaacgtggtcaagcatcacgtattcaatagtgactcggccctgattggcgttggatttctccagataacggcgcaccgcagcaaggaacgtttcgatattgtactttttgttgatcggcacaatttcgtcacgaatttcgtcgttcggcgcgtgcagggaaattgccagtgcaacgtcgatcatatcgcccagtttatccagcgccggaactacaccggaagtggaaagcgtgacgcgacgtttagacaggccaaaaccgaaatcatcaagcatgatttccatcgccggaacgacgttgttcaggttgagcagcggctcgcccatgcccatcatcacgacgttagtgatcggacgctgaccggtgacttttgctgcgccgacgattttcgccgcacgccacacctggccgataatttccgacacccgcaggttgcggttaaagccctgctgggcggtggaacagaatttacactccagcgcacaccccacctgcgaagagacgcagagcgtggcacggtcgtcttccgggatatacaccgtttcgacgcgctgatcgccaacggcgatcgcccatttaatggtgccgtcggatgaacgctgttcttcaaccacttccggtgcgcggatctccgccacctctttcagtttgccgcgcaacactttgttgatgtcggtcatctcatcaaagttgtcgcagcaatagtgatacatccacttcatcacctgatcggcgcggaagggtttttcacctaaatctttaaaaaactcccgcatctgctgacggttgagatccagcaggttgatttttccatctttcgtggtgacgttttcaggtgtgactaattgttcagacatatgctattccggcctcgttattacacgttatggcccctggagggttgaaaaaagaaacgccccggtgagcggctgctcgtccgggggcgctgcattgtacaaattctggcgcacggatgccacgtttgcacgcggcatttacgaaattattaacgggtgcgcggacacacttcgccttcgccgaagaaataagcgatttcgcgagcggcagattcgacggaatcagaaccgtgggtaccgttttcggtcaggctgtcagcgtaatcagcgcgcagagtaccagccagtgcgtttgccggattggtcgcgcccagcagatcgcggtgacgctgaacggcgttttcaccttccagcacggaaaccacgatcgggccagaggtcatgaattcaaccagaccatcaaagaacggttttccatcgtgttcagcataaaagccacgtgcctgttcaacggtcaggtgcagcattttggtgccgacaattttgaaccctgcagcttcaaagcgcgcaaagatattaccaatgacgttttttgctaccgcgttcggtttgatgatggaaaaagtacgttcaatagccatttttacctctgtaaattgttctgttgttgtctgtaccagcgtacgagatggcgcggattataatgagcaacagggccgttgactattgatgaaggtaacatttttttaaaataaacccagtttaagcaacaatcagggacaaaacagactattgcatgacaaatttcactgtcgcgatttgccccacgtcatccatcaccagcaattgataatcacctttatccgtcaaatgcagggtcacgttgcgcccgcgttcagttaacggttcgccattcagaaaccaccagcgttcacctgcccctccacttgattgcaacggcaaagtcgcttccgctgcgcccggtaaacgtttaataatcgctccatcgcgaacgcctgtcagctgcagcgggagctgggcatcgtgaccgtatggcgggcaaattgtcgaggccggtggcaagcgcacagcgcgacgttctgatgcgggcagccagggttccagcggtagcggccagacatttatcatttcttgtcgcgcttgcgggcaatcagcggcaacacgtttgccgttttcatccagccagatggggaaacgaatgccattaatgccttcctgctccggcagtaatagagttggcggctggctcccgtccagcaaccaggttgccaggcggcgccgacagttaccgtcaccttccggcaaagactgtccgcccggccagcagataacgccacgagtgactgagttcgggcgcgggtcttccggcagattcgcactgcgcgacagtaaaatattattgacctgattcaacaatggtacggcgctggcaaaaccaaactgaccaacaacgggcgtgccgtccggtctgccagtccagatcccaatgacatagcgagcgttaaccccaatcgcccaggcatcacgatagccatagctggtgcccgttttccatgccagtggggcgacgcgcggcaaggcactatccggtaagggttgcgcttcatcagccataatccggcgaatgatccacgccgcccccgacgacattaaaggccgttcaagcagcggatcgtcaggctgtaagcgcaatttgcctgccttgccgtggcgagcaaacgcggtatacgctgccgccatatcttccagttttgcaccagcgccgccgagaatgagtgaaagattcggcgcagcaccgttgggcaaatataacggcaatccaacattgcgtaactttgccgcaaaccgtttcggtccataggcttccagcacctgcacagcaggtaagttcagcgagcgcaccagcgcctcgctcatgctgatcgggccatgaaaaccgctatcaaagttacctggtcgataatcaccggtgcgccgggggacgtcttgcagcagtgatgccgggtggatcaagccttcatccagcgccagaccataaacaaacggtttgagcaccgatcctggcgatcggatcgcattgaccatatcaacatgaccaaagcgtgaatcatcgttgagatctaccgatcccacccagccgcgaacacgcatatcggtatgatcaaccacgatcatcgccagtgagctgcgcggtggtaaacgtcctttccagttttgcgccagttcttccagacgtcgttgaagaccggcatccagcgtagtaacgattttgtcgcttttgcttttaccgagcatcatgcgcgaaaacagcggtgccagttgcggcatttgtcggggtgccagccagatgggttcttcccttgactcttttacctgcttacgggaccacacaccttgctcagccatccgttcgagcactttattacgcgcggcttcggcacgctccggccaacgatccgggcgcagtcggctgggcgcttgcggtaacaccgccagcattgccgcctcggaatagcttaaattcgcaggcgattttccgagataagcccaacttgccgcaccgatcccctgcaacgtaccgccaaacggagcgcggttaagatacaaggtcagaatttcacgcttagacagatgccattccagttgcaacgcgcgccagagctggcgaattttgccgccaaatgttttggggtgaggatcaagcagacgagcaacctgcatagtgagcgtgctgccaccggaaataacccgtcccgaagtgagatcttgccatgctgcgcgcgccaccgagaatggattcacccccggatgcttccagaaccagcgatcttcataattgatcagcgcttcaaggtaacgtggagaaacatcttcgattgttaccggataacgccagatgccgtcagcatcggcgaagcgccagagcggcgtaccatcctgcgccacgaccactcgtgcgggattgacttcatgcagcggtagaggccagagtttatctgctccccacgcagcaagaaaaaggagaaagggcgcagctgccagcgttatccagcagccgcgtttggttaacaagcgaggcatttacggtctgacaatcagcaaatcttcagccgcgccggtcgcccgccattggggaacatacattgattccaccatcggttgcggtacctgatacgttcccggcgtcaccgcccgcgccagatacaccagcgttaccggttggtattcatcaacggcaaccgccgccacaaagcgatcgtcacggaactcaatgtgcttaatactcgcctgctgcatctggttcagtaagttctgcacttcgccaccactttgctccaggctggcgctaccgttcgccagattctggttttccagttccagacccgcaggcagcagatccacgaccaacgcatccggcacgctgttactggcttttacctgcaaccacaccagcaccagatcgccgctacgtaacgagtccagcgatttgctcttaccatcagtaccaagaatatgacgctcgatttgcagcacattgttcgccggtaaaggtgcggattgcggataaccgctggcatccacacgcaaccataacggctgatcgccactgttgctcacctgcaaggtggcaagttgatcgctattcagattgctgttttgcgctttctcgcctgtcagcggctcagctgagaaagaggtttgcgcctgccatttacccggtaaatcctgaatcgtacgggcagccaggaacaacgcgttactttcctgcgtcgatagccagcgttcaccaaacgcctgctgcgaaagtgcgttcagcagggagtactgctcatcgggtagcagtttgttctcttccagcaaggagagcattaacgcgttgtcgcgcagtggactaccgtaatcacccagccatatccgctcatcactatttctcggcgttttcagcgccagcacaatcgcttcttcaccacgcgttgcatcacccatggttttcagcgcaacgccaagttgcagcagcggtaaaccagaagcggcatctgcacgatgctcccagatttcacgcagcgcacccagcggagccttttgctgacgggccaacaccagcgcagcgtaagactgtacggcgaatttactggctttgagattatccgcgtacgggatcgacatcatgcccggatcttgtaaatagcgcagcagacgctcattaccccggttaatggcgtctgtcggcacgctgtaaccctgttcgcctgcgcggaccaggaaatccatcacgtaagccgtcagccagtactcttcgtcaccgtttttatcccacagcgcaaagccgccgttatcacgttgcatttgcagcaaacgggaaatgccgatatcgaccgatgcacggcgtttctcatcactgtcgcctttgatgcccaacgcctgcagttgggctgcgttggtataaagtgacgggaacaggccgctggcggtttgctcaagacagccgtacggatacgcttttaactctttgatataacgtgcgatgttcagcggtggtttgccgctcaacaacaattgcccttccagcgtaacaggcgagaagttttgcaatccatccgccggaatcgcccatgtcccaccaggctgtaacgccgtaccgtaattaaccgtttgtgccgggaacgccggacggacaccgattttccactgcttatgctgatcggcaacggtttcacccggtaacgctaacccgctaatggtggcctgaatttctccatcgccataacccggcaatgctcgcaccgggataaacagcgtagtacgcacacctggcgctaattcaacggctgcgggtgaatcgctgaccagttcaagcaaaccactggcggtcagggcaacgttcagtttttgcggtttatcggtaagattagtgatatccagcgtcagacgcgaggtatcgccactcgccataaagcgcggcatgttcagttcagcaatcaccggtgcggcaactatcactttgctttcgttgctaccgaagtcatctgccgtccaggcttgcgccatgacgcgcaattcaccgttaaaatcgccaatcggcagtgtaaccgagccttcgccctgttcgttgagcgttaccggcagcgcctgctgcgcgacaatattgacgtgattgaccggcggtttaccaccacgtttcagctcatcaccatcgccaccaaaacgcagagctgccagacgcccctgaccttcaataacctgaccgtaaatatcgtaaatgtctgcgccatagcgtttctgaccaaagaacgcctgccacggatctggcgtgacgtagtcagtaatattcagcacaccactatcaacggcagacaccagcacattcacctgtttaggcttctcgccatttttagtgctggctttaattttcacggttaatggttgattgggacgcatttttgctggtgtttccagcgccagatcgaggcgacggttttcatcaccaagcggcagatgcaacacaccaaccgcgcgttttggcgtcgcggagcgagatttatcgccaggacgcaccaccagcgtactcaaataaagatcatgacgattccaggttttatcgaccggaatcgtcagatccagcccttgagccggaacatcaatctcttgccaccacagcggcccttcactggactcgaccatcgcataacctttacccgccgttggcacggcaatatgcaacttaatggtatcgccagggcgataactggctttatccagtttcagcgtgacacggtcgggtcgcacagcaccgctcccgtcgctgttgtcctgccagctatagccagcccagaaacgcacactactgaccgcttcattcggcgctttgacttccagacgataagcgccccactctaccgggaaactgaccttaccggtttcatccgcctgaagatccagagtttgttcattttcgatcagatctttttgatcaaactgtgactgccagccttcatcttctgaccagttccagtagtaatcgcggcgttcgcgaatcaggcgcacctgcaagcccgacacggcttttttcacgccttgtgcatcgctataaacgatgtcaaaagcggcgttactgccttcatcaacaatgggctgtttcaccgtgctgtcagtgcgataatcgtaaaccgatttcgaggcgaacagcggacggatccccggcaatgcatcggctggccagatagcctgctcagcacggcgcgtcaccgggcgaccacctgactcaagcaaactgccctggaaaataacctgtaatggggaatgcgtttccttccactggctttctgttgaaacttcgccgcgccctttatcatccagcgtcaactgaacttcatccagcgtgcgggaaaggttttcggcagctatatcgccgaattcaaaaccaggtaaggctgacacagcctcacgcagtgggcgcaggaaaagttgcccttgcaaagtattaccattagcaggtgcaccatacaggtagtaccccaccacggagaatttcacttcatctttcggcgttagcggggttttctcaccggtcagattcagcgccatgcgctctggcataaaatcttcgacgtggaaatcccacatccgatactgattatcgcccgtgttagcgcgaatatgccacataccggttgccgcattgctatcgagtggccaggtaaagtggtagaggccattctccggctgactaacgacgctcctgagtacctgcccatcgggtttaatcacgtctaacttgatgggttgattgggcaacgctttaccgtctgcatcacgcagcaaaccattgaggattaccgtttcacctgggcgataaagatcgcgtgggccaaacatgaaaaactgtttgctatagcctggcgcgccagcaatgttaaattctgctaagtccagcgccggaagttttaaatcgagtagcgttgtctgaccgtctttacgcgccaacagtaatgccgcgtttttatcattttccagctgcacatgcccctgagcgtcactggttgcctgagtcagagtctgccctttctcatttaataaagagacttcaattccttgctgggccgcgccgttttccagactttgggtaaagatatccagacgattgtgataacggtgagctgaaacgccgatatcacttaacgtaaacagcgtcgcgggattactgtaatcgtaacgtccagcctgattcatcacagccagatacacgcccgcctgctgaagcggtttgatatcgcccagcggcagcaataatttttcacgggtgttacgcgcaggattgagatcaaaccgtccggtgtagaccagatccgccatctgcagcagtttgtctgactgccagttcgccagcgaattgcggtattcccattggctaatgaatgctggcagagattctggcttaacgcggaagaagttaacatcgacattattaacgttgagcgccattaccggcagcccttcaacgactttgccaggcagcagcgaaccacggctggcaaaaccgacgctgggttggatgtcgcgggtagttatagttttttcgtaatctttactgaaggttgcgttgttgagtgctttgacctccttgccaatagtaacgatcaaatcacgtttcggttcgaggtggcgtaaacgtaactctttaagattatctgacagctcccaggcaccatccactttgccgctttttttatcgacgacatgaataacgcgtgagaaatcctgatccgggtcgagagggatggagaacgtcagcaccagcgtggctgcaccatcaagttgggcttcagagagatccagcaatgtcagcgccttaccggcactctgttgtgccagtttttgtcgctctggcgcggagagttttgctgaactcgcgttttctgaagaggccgctttagtaacttcagaaggcgcatcttttttcaccgctgttggcgcgttatcgttgttgtcgcaccctgccagcgccagcattagcatgcaggcggctacgcgtaactttttcatttttcatccctgccacaatggcccgttagcaacgtcgaataattattatgcgtgagaatttacgttatgtaattcagtatcacgcccatacaatccgaattttagtgagaattgtggctcagacagccaaatcagcctcttttgcttgtcgcttttcactaaacatccgacaatttagcctaaccccggcaaaaatggagatgcctatgtccacgacatggtttgtaggagccgactggctcgccgaacatattgatgacccggaaattcagattatcgatgcccgcatggcgtcgcctggacaggaggatcgtaacgttgctcaggagtatctgaatggacatattcccggcgcagtgttttttgatatcgaagcgctttctgatcacacttccccgcttccgcacatgctgccgcgcccggaaacgttcgccgtggcgatgcgtgaattaggcgttaaccaggataagcacctgattgtctatgacgaaggtaatcttttctcagccccacgagcatggtggatgctgcgcacctttggtgtagagaaagtgtcgattctggggggtggacttgcaggctggcagcgcgatgatctgctgttagaagaaggtgcagtagagctgccggaaggagagtttaacgccgcgtttaatcctgaagccgtggtgaaagtaaccgatgtattattggcaagccatgaaaatacggcgcaaattattgatgcccgcccggctgcacgttttaacgcagaagttgatgaacctcgcccaggtttacgtcgcggacatattcccggagcactgaatgttccgtggacggaactggtgcgcgaaggcgaactaaaaacgaccgatgaactggatgcgatattttttggtcgcggcgtcagctacgacaaaccaattatcgtcagctgcggctctggtgtaacggcagccgtggttttgttagcactcgcgacgctggatgtgccaaacgtgaaactgtacgacggcgcatggagtgaatggggcgcgcgggcagatttaccggttgagccagtgaaataagtattttacaggcaataaaaaaccgccgaatttggcggtttttattgctagtctggttcgcggcctttccagcaggttgacttgtgttacatgagcaacgcaggtgcttcacagcaaaacaatactcaccagtaactctctttttgtcaagcaaaagagagtaattattgtttatttagcgtattatcgacaccggccctttccgccgtgttcggtaataaaataacctggcttattagtccgaattcagacaaatataaacaaatcctgctcaaaattaaaaattctaaccggtaaaagatattacttaaacatgtaaattcactttcctttaaaaaacaaaaaaccgccaaaatcaggcggttttttgttgctggtccggttcgcggcctttccagcaggttgtattaccgtagtaatgcaagcgcgtctcagcggagacaatactcgccagtaactctctttttgtcaagcaaaagagagttattattgttctgttagtgtattatccactgcggccctttccgccgtctcgcaaacgggcgctggctttaggaaaggatgttccgtggccgtaaatgcaggtgtttcacagcgcttgctatcgcggcaatatcgccagtggtgctgtcgtgatgcggtcttcgcatggaccgcacaatgaagatacggtgcttttgtatcgtacttattgtttctggtgcgctgttaaccgaggtaaataataaccggagtctctccggcgacaatttactggtggttaacaaccttcagagcagcaagtaagcccgaatgccgccctttgggcggcatattttagattatccgattctgtttaaagtcacgcaaaaaaccaccccagcgacgttcatagaatggcgcaatatgttcggtaataaagtggctaattcctttttccccttttttcacctgacaaatatcgattggttcatcgccaggtaatgtatcggtcgctacacttcccgtcgcctgaataatttcttcgatatcaccatcggcttcaatgccaataagtaaattaggctgtgcctcttcgttctctttaattgaacaaataaaagcacgcttcaccggcttaatggttttaaataaggtggtgagtgaatcaatcatttgtgctggcggctctgcgacttccgataatatcagcgattcaccgccttccaggatttcctggctgctcagcggatttccctcttcaccaatcaacaaactgatttcacgcggcataaattctttaccggttggcagtttggcattaaggaagagcgtttcgccaagtgtcatctcaaacagcgtgcgaacgggcattacgacaaatgcctgttcgtcttcaaccgcctgttgaagtgcttctaacgaggtgaaaaaaggaatgacgctggtgccgtcttctttttcccagtgctgtaaatcaagcgcgctatcttcaaccacagcctcgccctgcgccgccgtaccaggcacccagacggtggattccagtagagtacggaaaaaggccgggcggtgcgccggttcagttgctgctttttccagcaggtcttcaagttcgttttttgtttcggacataagaaccacaattcattcaacgttcggggcgcaaatgcctgatgcgctacgcttatcaggcctacaagggattcgcaatttgttgaatttgcagaatttgtaggccggatacggcgtttacgccgcatccggcatattagtttacgccgttaacagattagctatcgtgcgcacaccaagtcccgtagcgcccgcagaccactgttcaaccggcgctttacggtaagtcgccgagcagtcgatatgcagccagccttgctgatagttctcaacaaagtgcgacaggaagcccgccgccgtgctcgcgcctgccggatacgccgcgcttccggtattgttcagttcggcaaagttagacggcagctggctgcggtggaactccgccagcggcagacgccagaacggttcgttctcctgcgcggcactcgccagcaagcgaccggccagcgcatcgtcaaaactgaacagcgcgtgataatcattacccagcgcagttttcgccgccccggtgagggtcgccgcatcaatgatcatttccggtttctgcgcactggcatcaatcagaccatcggcaagcaccagacgcccttcggcatcagtgttcatcacttcaacttttttaccgttgcgataggtgatgatatcgcccagcttgaacgcattgccgctaatcaggttatccgcacagcagaggaacagcttcacgcgcttgttcagtccgcgcgtaatggcaaatgccagcgccccggtaaccgttgccgcgccgcccatgtccgacttcatcgagtccataaacgcagtctgtttgatgctgtagccgccggagtcaaaagtgatacctttacctaccaggcacgcgtacactggcgcttctttatcgccagttgggttgtaatccagcgccagcaataccggagaacgttctgaaccgcgtccgacggtgtgcagccccatataaccttgctcacgcagatcttcgcctttggtgatccgataagtcacacgatcgcccgcgacgttgctgatcagatcaacagcacgctgtgccagttgcgatggtcccaattcttctgccggtgcgttgatggtgtcacgcacccagtcgatgatcatcaggcggttatccagttcctggcgctgggcatcgtccagatccggccactccactttacgcgtgcctttcggggctttgtaaccttgccagaatgcccagcagcgatccgcatcccaaccttcaccgcttaactgaacatgcttgatgcccagaccgtcaatcttgcgggccgcacgctggatcagccccagatcgtctgccccgttcaaatgcagggtaatgccatcattattaatgctgtaagttgctttttctccccagcgcgcgtcggcaggttgggtagagagggtaatcttcatcgcttctgtcattttagttatccttctttgtaaaagggccgccagttggcagccccaggatttttccgctaaatgattcgcgttgcaggaaggcggcaagtgagtgaagccccaggagcatagataactatgtgactggggtgaacgagcgcagccaacgcatctgcggcgtgaagcatgacgcggaaattattcggcctcgtccagccagactaacaaaatcgcttcgaggattttctcgttggatgcctgcgggtcgtcgtcgaaatcttccagatcgcaaatccactgatgcatatcggtgaatcgaaccgttttcggatcaagatcgggatacgcatcgtacagtgcttcgccaatttcgcggctatcggtccacttaagtcccatactaacctctgttaatgctcacgcgcatggttgatagtgtaacgcgggatttcgactactaaatcttcgtcggtaacgcgcgcctggcagcttaaacggctttccggctccagtccccaggctttgtccagcatgtcgtcttcctgctctgagctttccggcagtgagtcaaaaccttcacgaacgatgcagtggcaggtggtgcaagcacaggatttttcacaggcgtgttcaatctcgataccgttacgcagagctgcgtcgagaatggtttcaccgctattagcttccagaacagcgccatcagggcagagatcctgatgaggcaaaataacaatctttggcatattaaacctcgtccacggaatggcctttcagcgcacgacgaaccgactggtccatgcggcgagcggcgaaatcctgggtttgtttgtctacgtttttaatcgcttgttcgatggcgtcaacatcatcgccctgcgccacttcactcaggtgagcggcagcatcgtcaatgacctgacgttctgcggcgcttaacagcgcggcatcagcagccagcgcgccgtgcagactttccagcacacgcgccgcttctactttttgttctgccagcattcgggcttttacgtcctgctcggcatagctcattgagtctttgatcatcgaagcgatttcgctatcggtcagaccgtaagacggtttgacctgaatagacgcctcaacgccggtggatttctccatcgccgtcacgctcaaaagaccgtcggcatcgacctggaacgtcacgcgaatatgcgcaccgccagccggtagcgccggaataccacgcagcgcaaaacgcgccagtgagcggcagtcctgcaccagttcgcgctcaccctgcattacatggatagacatcgccgtctgaccatctttaaaggtggtgaaatcctgagcgcgggccaccggaatagtggtattacgcggaatcactttctccaccaggccgcccatcgtttcgaggcccagcgacagtgggatcacatcaagcaacagcatttcgctgtctggcttgttacccaccagaatatccgcctgaatcgccgcgccaatagcgacgactttatccgggtcgatggaagtcagcggtggacgaccgaaaaattcgcctacccgttcacgcaccagcggcacgcgagtagaaccgcccaccatcaccacttccagcacttcatcagcttctacacccgcgtctttcagcgcgcgacgacaagccagtaaggttcgttttaccagtggcgcgatcagttcattgaattgttcacggctgatttcgccctgccagcccgcaacgttaacggtcacggagtccgcatcgctcagcgcgattttggctgcaatggcggcatccagcagttcacgctgaacgcggttatcgctacgatcaggaatgcccgcctgctcgcgaatgtaatccgccagcagatggtcgaaatcatcgccgccgagcgcggaatcaccgccggttgccagcacttcaaacacgccgcgacttaagcgcagaatggaaatatcaaacgtcccgccaccgaggtcataaacggcgatcacgccttcctgaccggaatccagcccgtaggcgatagccgcagcggtcggttcgttaagtaagcgcaggacgtgaaggcccgccagacgcgccgcgtctttggtgccctgacgctgggcatcgtcaaagtacgccggaacggtgataactacaccatccagctcgccagccagggcttcagttgcccgcgccgccagtgctttgaggatgtccgcagaaacgcgcaccgggttcagcagccccgccgccgtttcaatcatcggcaggccgttttcgctggcctggaattgataaggcagatgcggatagcgttgctggatatcagccagcgagcgtcccatcaggcgtttaacagaactaattgtgttggcggtatcgagcgctgcattagtacgcgcgtcataacccaccgaatgcccttgctgttgatagtgaacaacagatggcagcaggtgacggccttcatgatcggctaacgtttcggcctgaccgctgcgcactgtcgccaccagcgagttggttgtgcccaggtcaataccggccgccagacgacgctgatgcggcgcagcactcaaaccaggttcactaatttgtaataaggccatgtttagcttccagaaattaaaaatcgagcagtttttcttcgagttgttcggcactgcttcgcagtttatcgagaaaacgcagcttacgcacggtatccgccgccgcgtcccacgtctcgttgtctaactgttcaaccatcaactgatggcgggtatcaaacatctttttcacacgtttgataaagctttccagccgcgcttcatctttcgcctgttcgatctcgtccagctcttcgcgcagctccaactgttccatcaggaacgcggtgtcgcgcacagtatgctgctcgctggcgagatcaaagccgtgcaaagaaagcaaatattccgcgcgcattaacggatgacgcagcgtttgccaggcctggttaatggttgcagattgctgtacggcggcgagttgttccgcctggcttccgctggcgaatttatcaggatgatactgacgttgtagatcctgaaaacgcaggctcagcgcctgggtatcgagttgatagcgggcaggcaagccaaagagggtgaagtaatccataacattctcagggctgcgatccgccgcgataacggcgaatcaggtaaaacaaaccccacgcgcaggcgaccacggtggggttatcggtatgcgcatcaaacgtggaagctttcgccgcaaccacactcatctttgacgttcgggttggtgaatttaaacccttcgttcaggccttcttttacgaagtccagctgcgtaccgtccagaaattgcaggcttttgccatcgaccacgactttcacgcctttgtcttcaaacacgatgtcttccggcgtcggttcgtcaacaaattccagtacataagccatacctgaacacccggaggttctcacgcccagacgcaggccaaaccctttaccgcggttagccagaaaggtatttactcgcgctgctgcactgtcgctcagtgtaatcgacataaccaaacctcaactcttattttgcttcacgtttgcttttatagtccgcaatggcggctttgatcgcgtcttctgccagaatagaacagtgaattttcaccggcggcagttcaagttcttcagcaatatcggtgtttttgatcgcctgcgcttcgtcgagagacttccctttcacccattcggtgaccagggagctggaagcgatagcggaaccgcagccgtaagttttaaaacgcgcgtcttcaatgataccttcatcgttgactttaatctgcaacttcatcacgtcgccacaggccggtgcccccaccatgccgctgccgacgttctcgtcgttgttgtcaaaggaacccacgttacgcggattctcgtaatggtcgataactttttcgctgtaagccattataaattctcctgattccgataccgattaatgatgagcccattcgatgctgttcagatccacgccctgcttgtacatttcccacagcggagaaaggtcacgcagacgaccgatggatttacgaactaactcgatggtgtagtcgatctcttcttcagtagtaaaacgacctaaagagaaacggatagagctatgtgccagctcgtcgttcagccccagcgcgcgcagcacgtaggacggttcgaggcttgctgacgtacaggcggaacctgaagaaactgcgaggtctttcagcgccataatcagcgactcaccttcaacgtagttgaagctgacgttgagaatgttcggcgcaccgtgttccaggtcaccgttcaggtaaacttcttcgatatctttgatgccgttccacagacggttacgcaggccgcgcagacgttccatctcggtcgccatctcttcttttgcgatgcgataggcctcgcccattccgacgatctggtgaacaggcagagtgccggaacgcataccgcgctcgtgaccgccgccgtgcatttgcgcttcgatgcgtacgcgcggtttacgacgtacatacagcgcaccgatacctttcgggccatagattttgtgaccggagaaagacatcaggtcaactttcaactggctcaggtcgataggcagtttacccacgctctgggttgcatcaacgtgatagataatgccacgagcacggcacatttcgccgatagccgcgatatcctgcaccacgccgatttcgttatttacgtgcatgatggacacgaggatggtgtcgtcacgcatcgctgcttcaagttctttcaggtcgataatgccgttacgctgcggtgccaggtaggtgacttcaaaaccttcgcgctccagctgacggcaggtatccagtaccgctttgtgttcggttttgctggtgatgatgtgcttgccttttttctgataaaagttggctgcacctttgatcgccaggttgtcagattcggttgcaccagaggtaaagacgatttcacgcggatcagcgccgaccagatcggcaatctgattacgggcgatatctaccgcttcttcagcctgccagccgaaacggtgagaacgggaggccgggttaccaaaggttccgtccatcgtcataaactgcatcattttctcggcaacacgcgggtccaccggcgtggttgcggagtagtcgagataaatcggtaatttcattgctctataaactccgtacatcactcaatgcaaggaatcaggctaccggctggatgtacgaccgtgtttacggagtatttagcactccggcctgattctgaattctttttattaagcgcgtaacttaacgtcgatcgcgtcttgtgtgcgggtgcgtggcgcgtcgtgagtatgctgacgaccagacacatccagcacttcctggttattaaccagttcgcctaaagtaatgttgttgagaaaaccggtgagacggtcgctcaaatcacgccacagcgcgtgggtcaggcatttatcgccgccctggcagccgcctttaccctgacaacgggtggcatctacagattcgtcaacggcgctaattacttcgccaacggcgatgctgctggcatctttgcctaacagataaccaccgcctggtccacgtacgctggaaaccagaccatttttacgcagacgggaaaacagttgttccagataagaaagggaaattccctgacgttcggaaatatcagccaacggtaccgggcccgcttcagagttgagcgcaacgtcaagcattgcggtcacggcatagcgccctttagatgtcagtctcatgtcttacttcacctcaaactcgcccctgcccggggttttttattgtaaaagtgggggtattgcatagcaggatcaagtctgacattcccgagtaaattggtcaactatttacttgactgatttagtcgggtatttaaccttcagtgccatttttttatcgtggcgtttgtacctgttgtcggatgcggcgtgaacgccatatccgccctggggttctgtacactgtaggcctgataagacgcattacgcgtcgcatcaggcaacggctgtcggatgcggcgtgaacgccttatccgacctacggttctgttcactgtaggcctgataagacgcattacgcgtcgcatcaggcaacggctgtcggatgcggcgtgaacgccttatccgacctacggttctgttcactgtaggcctgataagacgcattacgcgtcgcatcaggcaacggctattattcggccttgttacctttattctgctgctcaatagaagccagaatcccgcgcaggatattcaactcctggctttccgggcgcgcacgggtaaacagacggcgcaatttattcatcacctgccccggatggttttcacggataaaaccggttgccagcagcgtttgttccagatgaccataaaaacgctccagatcatcgaccagcggatacggcgtctcttcatgctcgacctgctcgccgttttcctgagttgccagccaggccatgcgcacttcataggcaataacctgaaccgccatcgccaggttcagcgagctgtattccgggttagccgcaatcgcgacatgataatggcatttctgcaactcttcattggtcaagccgacgcgctcgcgaccaaacaccagcgccaccggggtatttgccgcttcagcgacgcttttcaggccgcattcgcgcgggtcgagcatcggccatggcagcgtgcgggaacgtgcgctggtgcccaccaccaggctacaaccggctaacgcttcgtcgagcgtatcgacgatgtgagcattaccaatcacatcgctggcccctgctgccagggcaatcgcctgggagtcgggtttcaccagtggattaaccagccacagattggttaatcccattgttttcatggcacgggcaacagaacccatattgccggtgtgtgacgtctccaccagcacaattcgaatattttgcagcattgtctttcttcgtctaaagattattcgcgcatcttatcataaaacgaagacagatgccgatctcgctgctatactctgcgccgttttcccgttctttaacatccagtgagagagaccgatgcatccgatgctgaacatcgccgtgcgcgcagcgcgcaaggcgggtaatttaattgccaaaaactatgaaaccccggacgctgtagaagcgagccagaaaggcagtaacgatttcgtgaccaacgtagataaagctgccgaagcggtgattatcgacacgattcgtaaatcttacccacagcacaccatcatcaccgaagaaagcggtgaacttgaaggtactgatcaggatgttcaatgggttattgatccactggatggcactaccaactttatcaaacgtctgccgcacttcgcggtatctatcgccgttcgtatcaaaggccgcaccgaagttgctgtggtatacgatcctatgcgtaacgaactgttcaccgccactcgcggtcagggcgcacagctgaacggctaccgactgcgcggcagcaccgctcgcgatctcgacggtactattctggcgaccggcttcccgttcaaagcaaaacagtacgccactacctacatcaacatcgtcggcaaactgttcaacgaatgtgcagacttccgtcgtaccggttctgcggcgctggatctggcttacgtcgctgcgggtcgtgttgacggtttctttgaaatcggtctgcgcccgtgggacttcgccgcaggcgagctgctggttcgtgaagcgggcggcatcgtcagcgacttcaccggtggtcataactacatgctgaccggtaacatcgttgctggtaacccgcgcgttgttaaagccatgctggcgaacatgcgtgacgagttaagcgacgctctgaagcgttaatgactcaggcgggtgatatcactcacccgccctcgcctttcaggcgctattccgaaatacttcctcactgctttactttctttcgtcactctcccaccatctttccccgattaatggatgataaagaagtcgcaaggaaaggttatggcactgccagtgaacaaacgcgttctcaaaattctgtttattctctttgttgttgccttctgcgtttatttagtgccgcgcgttgccatcaacttcttctattatcctgacgataaactttacggtcccgacccctggtcggcggaatccgtcgaatttacggctaaggacggtactcgtctgcaaggctggtttattcctttttcgacgggccctgctgacaacgctatcgcaaccatcattcatgctcacggcaatgccggaaatatgtccgcccactggccgctggtcagttggttacccgagcgtaatttcaacgtttttatgtttgattatcacgggtttggtaaatcaaaaggcacgccgtcccaggccggattgctggacgatacgcaaagcgccatcaatgtggtgcgccatcgcagtgatgtaaacccacaacggctggtgctgttcgggcagagtattggcggggcgaatattcttgctgttattggtcagggtgatcgtgaaggcatacgtgcggtgatcctcgactccacatttgcctcttatgcaaccatcgccaaccagatgatccccggcagtggctacttacttgatgagagttacagtggcgaaaattacatcgccagcgtcagcccgatcccgcttttactcattcacggtaaagccgatcacgttatcccatggcagcacagcgaaaagttgtatagcctggcaaaagagccaaaacggttgattctaatcccggatggcgaacacattgatgctttttccgatcgtcacggcgatgtttatcgcgaacagatggtggactttatccttagcgcgttgaatccgcagaactaacccatgatcgctagcacgataatcattcacaaaaccaccttaagacatgctaatccactggtcagaacagtttaagatgagaaaaattctgtgacgcttgccaacatttctgatgattagcattcccttcgccatttccttgagcaaactttagctattcttatcaattatgcttatgggagatctacagatgatgcctacgcttgctccaccatctgtcctttcggctccccagcgccgctgccagatcttgctgacgctctttcagccggggttgaccgccaccatggcaaccttcagcgagcttaatggtgtggatgatgatattgccagtcttgatatcagcgaaacaggacgggagatcctgcgctatcatcaactcacactgacgactggttatgacggtagctaccgggttgaaggtacagtgcttaaccaacgtttgtgtttatttcactggctacgacgtggtttccgtctgtgtccgtcatttattaccagccaattcacccccgccctgaagagtgaactgaagcggcgcggaattgcgcgtaacttttacgacgataccaatctacaagcgttagtgaatctctgctcccgacggctgcaaaaacgctttgaatcgcgcgatattcatttcctgtgtctgtatctgcaatattgtttgctgcagcaccacgctggaattacgcctcagtttaatccgctccaacgtcgctgggcggaatcctgccttgaatttcaggtagcgcaggaaattggacgccactggcagcgtcgggcgctccagcctgtaccacctgatgagccactgtttatggcactacttttttccatgttgcgggttcccgatccattgcgggatgcgcatcagcgggacagacaattgcgtcagtctatcaaacgtctggtaaaccattttcgtgagctgggaaatgttcgtttttatgatgaacaggggttatgtgatcagctttatacccacctcgcccaggcgttaaatcgcagtttgtttgccatcggtattgataataccctgccggaagagttcgccagactgtacccacgcctggtgcgcaccacccgcgcggcgctggccggatttgaaagtgaatacggcgtccatctttctgatgaggaaagtggtctggtcgcggtgattttcggtgcctggctaatgcaggaaaacgatctgcatgaaaaacagattattcttcttaccgggaatgatagcgagcgagaagcgcagattgagcagcagttacgcgaactaacgttactgccgctcaacattaagcatatgtcggtaaaggcatttttgcagacaggcgctccgcgtggcgcggcactgattattgcgccttataccatgccattaccgctcttttcaccaccgctgatctatacggacctgacgctgacaacacatcaacaggagcagatccgcaaaatgctcgaatcagcatgagggaacaactttcgggcgcaaaaacattgccggaagcgccaccagcgccattacccagaacacgccgtggcccagatattgatacaggaaaccggcgaaaacggtcatgatagcgatactgccgcccatcgcgacggcagagtaaaccgcctgtaaacggatgacttcgctaccctggcgagcagcaatataacgcatggcggccaggtggcagaccgtgaaggtgccgcaatgcagaatttgcaccactatcaaccacggcaacgccgtagttgctcccataatgccccagcgcactacgccgcaaatcgccgagatcaacagcatatcgcgtgcactacaacggcggaaaagtttattactcagcgcaaagataatgacttccgccaccacgcccagcgaccacaaataccccaccgccgaggccgagtagccagctgcctgccagtaaatggcgctaaaaccgtaataggccgcatgtgccccctgcaataaacaaacgcaggccagaaagcgccagttctggcgaaccagcgccaaccacgcagaccaaccggtgctctcctgctggcgacttgccccttgtggctgaatcgtcggacggatgagaaagccgagcagcatggatgccacgcccaacgtcaacagcgcgaggatcacccgataatcaaacatagtgaccagtttgcccgtcagcgccgagccaatgacaaacgccaccgagccccacagtcgcactttgccgtaatcaagcgggaactgcttttgccacgtattcgccagtgcatcggtcaacggtaccagtggtgagaaaaagaggttaaagccaatcatcaccagcatcagccacgctacgtgcgcccccgcccagaaggcgacagcaaagagaagtgtcagcagtgccagcacgcgcaaggcggaaatcaggcgggaaggatcgctgacgcggggcgcgatgagcaaactcccgaggaaacgggcaaccagacctgcccccaataacaggccgatggtttctggcgttaaaccaatccctttaagccagacgctccagaaaggtagaaaaatgccgtaactaaaaaagtatgtgaaatagccgagcgccaaccagcgcgtggattgcaaaaccatgagtccctcccgtcaggaggcgttagtctggggttaatcgaatgttggtgcaagttgaaaaataagaatattcgagcctgcttcccgatgtctgtaacgccagttcacaagcactaaaaaactgagatccgcgacgcatgttgcaaaaataatgcgtaattatgccgttacgcttgccaaacgttcctgcacaatggcgatgaaatcgcgtaatgccggcttcatctcccctttcttccacgccatcagtaaagcaatggaaggcacatttccggcaatgggacgaaaaacaacctgtccggtattaaaattattcatataaccgggtatcaaagtgacgcccagccccatgcccaccagattcatggtcaccagaatattcgttgccacctggacgatatttggctggctgttttcttgcgcaaaccacgctttaacgatcggcgcaagcgaaccggaatacaccggatcggtactgacgaaattcacgccatccagttgcgcggcggtgatctctttttcatgtgctaaagggtgatcaaccggtaacaccaccactaatggttcgtcaaaaagctccagataatcaatctccgggctataaacaggatggcgcattaagccgacgtcgagttcaccacggcgaattttttcctcctgttgcgtggtgattaaactcaccagctcaatcaaggtgtctggctgtctgagacgaaacatcggtaatacttttggcagtaaattcacttccgccgatggcacaaagccaatggttaattgtctgtcttcctgaacaattttccgcgcccgtaatttggcattttccgcttgttcgaggattgccagcgcgtcctggagaaaacattctcccgccgccgtcaacgcgactttgcgcttatccctcaccagtaacggaacaccgacacagttttcaagatcgcggatctggctgcttaacgaaggctgtgaggtatgcagtttttccgccgcacgggtaaagttcagtgcctgcgccactgcaacgaaatagcgtaaatgccgtagttccatcaccttccccttgttatcgaaaaaacgtctcagctggtagaaattaactatttcacatattagcaaccaaccagcaacatccttatggcacaaaaatagaaggtcaatacatcttatctttcaggattaaaaaatatgaccacaccctcagatttgaacatttaccaactgattgacacccaaaacggtcgggtcactccgcgtatttataccgacccggacatttaccaactggagcttgagcgtattttcggtcgttgctggctatttctcgcccacgaaagccagatcccaaaacccggtgatttctttaacacctacatgggagaagatgcggttgtcgtagtgcgtcagaaagacggcagcatcaaggcgtttctcaaccaatgccgccaccgggccatgcgtgtgagttatgcagattgcggcaacactcgcgcctttacctgcccgtatcacggctggtcttatggcattaacggcgagttgatcgatgtaccgctggaacctcgcgcctacccacaagggttgtgtaaatcccactggggactaaacgaagttccttgtgtggagagttataaggggctgatttttggcaactgggataccagcgcaccgggcctgcgtgattacctgggtgacattgcctggtatctggatggcatgctggatcgtcgcgaaggcggcaccgaaattgtcggcggcgtacaaaagtgggtgatcaactgtaactggaaattcccggcagagcagttcgccagtgaccagtatcatgctctgttcagccatgcttctgccgttcaggtattaggggcgaaagatgatggcagcgataagcgcctcggtgatggacaaaccgcccgcccggtgtgggaaaccgccaaagatgcgctgcaatttggtcaggacggtcacggtagcggtttcttctttactgaaaaaccggatgctaatgtctgggtcgatggcgcagtttcaagctattaccgcgaaacctatgccgaagcagaacaacgtttaggtgaagttcgcgccctgcgcctggcgggtcataacaatattttccccacgctttcatggctcaacggcactgccacgctccgcgtctggcatccgcgcggccctgatcaagttgaagtgtgggcgttctgtattactgacaaagccgcctccgatgaagttaaagccgcttttgaaaacagcgccactcgtgcttttggtcctgctggttttctcgagcaggatgactcggagaactggtgtgaaatccagaaattgctgaaaggtcaccgcgcccgcaacagcaaactgtgtctggaaatggggcttggtcaggaaaagcgccgcgacgacggcattcctggcattactaactatatcttttcagaaactgccgctcgtggaatgtaccaacgctgggccgatcttctgagtagcgaaagctggcaggaagtgctcgataaaaccgccgcttaccagcaggaggtgatgaaatgagtgcgcaagtttcactagagttacatcaccgcattagccagtttctctttcacgaagccagcttactggacgactggaaatttcgtgactggctggcgcagctcgacgaagagattcgttacaccatgcgcaccacagttaacgcgcaaacacgcgaccgccgcaaaggcgtccagccaccgacaacctggatttttaatgacaccaaagaccagctggagcggcgaatcgcccgtctggaaacgggcatggcctgggcagaagagccgccgtcacgcacccgtcacttaatcagcaactgccagataagcgaaaccgacatcccaaacgtatttgctgtgcgggtaaattatctgctttatcgggcacaaaaagagcgcgatgaaacattctatgttggaacgcgtttcgacaaagttcgccgtctggaagatgacaactggcgcttgctggaacgggatatcgtcctggatcaagcggtaatcacttcccataacctgagtgtactgttctgatgaatcgaatttatgcgtgtcccgttgcggatgtgccggagggtgaggctctccggatcgatacctcgcccgtcatcgccctgttcaacgttggcggcgagttttatgccattaacgatcgttgcagccatggtaatgcgtcaatgtcagaagggtatctggaagatgacgccacggtggagtgcccgctacacgccgccagtttttgcctgaaaacggggaaagcgttatgcctgcccgccaccgatccgctcaccacttatccagtacacgttgaaggtggtgacattttcatcgacttaccggaggcgcagccatgagcgatctgcataacgagtccatttttattaccggcggcggatcgggattagggctggcgctggtcgagcgatttatcgaagaaggcgcgcaggttgccacgctggaactgtcggcggcaaaagtcgccagtctgcgtcagcgatttggcgaacatattctggcggtggaaggtaacgtgacctgttatgccgattatcaacgcgcggtcgatcagatcctgactcgttccggcaagctggattgttttatcggcaatgcaggcatctgggatcacaatgcctcactggttaatactcccgcagagacgctcgaaaccggcttccacgagctgtttaacgtcaatgttctcggttacctgctgggcgcaaaagcctgcgctccggcgttaatcgccagtgaaggcagcatgattttcacactgtcaaatgccgcctggtatcctggcggcggtggcccgctgtacaccgccagtaaacatgccgcaaccggacttattcgccaactggcttatgaactggcaccgaaagtgcgggtgaatggcgtcggcccgtgtggtatggccagcgacctgcgcggcccacaggcgctcgggcaaagtgaaacctcgataatgcagtctctgacgccggagaaaattgccgccattttaccgctgcaatttttcccgcaaccggcggattttacggggccgtatgtgatgttggcatcgcggcgcaataatcgcgcattaagcggtgtgatgatcaacgctgatgcgggtttagcgattcgcggcattcgccacgtagcggctgggctggatctttaaggaagcacgatgaaagaaaaaacgatcattattgtcggtggcgggcaagcggcggcaatggctgcggcctcgctacgccagcaagggttcaccggtgagctgcatctgttttccgatgagcgacatcttccttatgaacgacctccactctcgaaatccatgttgctggaagattccccgcagttacagcaggtgttacccgctaactggtggcaggaaaacaatgttcatctgcattccggtgtaaccatcaaaacgctgggtcgcgacacacgagagttagtgttaaccaacggcgaaagctggcactgggatcagctttttatagcaaccggcgcggcagcccgaccgctgccgttgcttgatgcactgggagaacgctgctttaccctgcgccatgccggtgatgccgccagactgcgagaagttctgcagcccgaacggtcagtcgtgattgtcggtgccggaactattggtctggaactggctgccagcgccacgcagcgcggatgtaaggtgacagtgattgaactggcggcaaccgtcatgggccgtaatgcaccaccgcccgtgcaacgctatcttttacagcgccatcagcaggctggtgtgcgcattctgctcaataatgccattgaacatgtggtcgatggtgaaaaagtagaactgacgctgcaaagtggcgaaacgcttcaggccgatgtggtgatttacggtattggtatcagcgccaacgaccaactggctcgcgaagccaaccttgatactgccaatggcattgtcattgatgaggcttgccgcacctgcgatcccgcgatctttgccggtggcgatgtggcaatcactcgtcttgataatggtgcactacaccgctgcgaaagctgggaaaacgccaataaccaggcgcaaattgccgctgccgcaatgttagggctaccgcttccgctactgccgccgccgtggttctggagcgatcagtacagtgataacttacagtttattggcgatatgcgtggtgatgactggctttgtcgtggcaacccggaaactcagaaggcgatttggtttaatctgcaaaacggcgtgcttatcggtgcggtaacgctgaatcagggacgtgagattcgctcaatccgcaaatggatccagagcggcaaaacgtttgatgcgaaactgctgatagatgagaacatcgcgcttaaatcactgtaaccaggataattagcgaatatctcaatgcctggggcgtggcgaggtgcaagagtgtgtattacgtttaaatcacattatcttgcaaagggattggttatgaacacactacgttattttgattttggagctgcccgccccgttttgttattaattgcccgtatcgccgtggtcttaattttcattatttttggttttcccaaaatgatgggctttgacggtacggtccaatatatggcctcgttgggcgcgccaatgccgatgctggcagcgattattgcggtagttatggaagtgcccgccgcgatattaattgtgcttggctttttcacccgtccgctggcggtgctgtttattttctacacgctgggtacggcggtgattggtcaccattactgggatatgaccggcgatgccgtcgggccaaatatgattaatttctggaagaatgtcagtatcgctggcgcattcctgctgttggcaattaccggaccgggggcaatttctctcgatcggcgttaggaaagatgccggatgcggcgtgaacgccttatccggcattttataaattacagccactctacccgcaacgacatctctgaagttgttgattcccctggtgctagcgcaatgagatcacccccttccgggcgatgatgatcatccggcgcatggctcatcggttccagacagaagaaatcaaacgcatatcctttatcaaacgcagggtcggaaacaaagatgaaataacacggtgcaggtggcgtcgtttccatgatgatggcataaccttcctgcggctgctcgatgcgggcctgaccattccatccggcaaaaccattgttcacccactggcgcggcaacggcgcgagctggttaaaatccagttcctgcggtagctgctcgcaaaactcacccgccagccactgctcccgttccagccagtaaccgctcgcctgcgcctgaatccgcgtttgtggtgacaacggaaaataaggatgccagccggtaccaaatggcagcgtctctgctccttgattggtgacagagagcgtcaccgtcagcgtatccgccgttaaatgaaacgcctgacttacccgatagtgataaacaccgctgcgatgttcatacaccagacacaagctatcatcattgcgcgagacacattgccactgccccagccagccgtcgccgtgcagatagtgcgcatcccattcaacattcggttgcaattgatactcacgcccctgccagacaaaatggttgccgctcacccggtttgcaaacggcaccagcggaaaacaggaggcatcggttgccacaccgctttttttaccaggacgtaagagcggcgtcgtatcgcgccagaagccttcgattacgccgccctggtcagaaacgtccagctttagcgacccgtgggataaggtatagatggtcatccgctaactccttaatccgggaagttaatcacaactttcccgcatttgccgctcgccatcagcgcataggcatcacctgcctgttccagcgagaagcgatgggtaatggcgttacgcggccacagtttccagtccgttaaatcgtgggcgcatttttccatatggaacagactggtcacccaggagccaataatccgccgttgatggtgcatcagatcggcgctgacctcgaattccacttttccggtttcaccaatgtaaaccacccgcccccagtcagcagtggattgcagtgccagcaagcgacctgcggcattaccggaacaatcgagcgcaacatccgcgccaccgtgggtaagttcagcaattatctgcggcagaccttcggtggtcgctaaatagccgtgatccatcacccctaactgttttgccatcgccagacgttccggcagcatatcaacgccgatgatccgttttgcaccgcgacctttcgccagcatcatcgccatcatgccgaccggccccagaccgaccaccagcacgttatcgctgccggaaacttcgccgcgcaaaatcccttcataggccgtgccaacgccgcaactgataaacgcaccatcttcgtagctcagcgcatccggcaggaggatcagatctttttcttccgccagcagatattcggcatgaccgccgtcacgctgccagccgtaagccgcttttcctttgccagtacaagaaataggaaaaccgcgacggcagttcgggcaaaaaccacagccagaaatgtgatacaccagcacgcggtcgccctctttaaaatggcggcagccttgccccatcgccacaatctgcccgcacggttcatgaccgttgataaagccctggtataacggtttatcgggtgccgccgctgtggcacggtgttgatgatagatatagtggacatcgcttccgcaaatcccggaggatttcattttgatcagtacctggttaatccccggcgtcggcaccgcaacttcccgcagatcgacggtcgaatttcctggtaaataagctgccagcatcgttttcataaatccctcattaacaatacgattaattttcatccctgccgcacccgcgccaggggcgttaaggtttagcgtttcgctttactgcttcgctgggtcagcaagatattcgccagcaccgccaccacgatgatgacgccgcgtaccacctgctggaaaaaggagttaataccgagcagcaccagaccgttaccgattagcgtaatcaccagcacaccaagcaatgtaccgaacagggaaccgcgaccgccggaaagtgccgtaccgccgaccacgaccgcggcgatgacgtcaaactccagaccgtttgcggcacctgcgttaccggaaccgaggcgcgccgccaacaaaatgccggtcaccgccgctaataatcccgaaagggtaaagataagaatgcgtacccgacgaacgttgatgccgcacaactgcgccgccgtggcattaccgccaacggcaaaaaccgagcgcccgaaggcggtttttcggctaatgaacacaaacagcgcaaacaacaccatcatgatcagcgcggatactggcacaccgagaaattgtccgcccagccagtccagcacctcgttttcgtcaatcggcactggcagtgcgttggtcataaacagccccattccgcgcagggcgctccacagccccagtatggcaacgaaacttggtacgttaaacacgccgcgcagcaccccggcgagcgttcccatcagcgcgcctaacagcaacaccagcaaacaagcaatcgccaacggaacttcaaattgcagcaaaaatgccaggcacaccgagacaaaagccaccatcggcccaacgctgacatcaatttcaccggagataataatcagcgtcatcgcccaggcggcaatcccaatggtggcggcatcgcgcagcacgttcatctggttattcaatgagataaagccaggcgcgttcagggagaagaccagataaagaatggcgattaccaccagcaaaccgatctcattaatatggcgactgacaaattgtttgagcgagacgctcttgccctgcggcaatgataatgacgaagcagacatcttcaggttcctcggtaaaattcatcagtgcacagacagaatggcggacatcagctcatccacattgaccggcgagtgaaactcctgcgagaacgtaccgtgctgtaacaacaggatgcggtcgcacaccagcggcaactcctccacttcactggagataaacaccacgctttttccttcggcagccagctcacggacaatacggtaaatctgctgtttggcttcgatatcgacgccgcgcgttggctcgtcgagcaacaaaatctggctggtggcatagacccaacgaccgatcaccactttttgctgattgccaccagaaagcgtgccgatgggtgtttcgctactggcagccttgaccgtcatccgctgcatcacctcttcggtcaggcggcggatggtggaccattgcagcacaccgttggtgctgattttttgccgattggtcagcactgtattttcgtcaacgcccagccagggaatgatccccgcttctttgcggttttctggcgtatagccaatgccgcgtttcagcatgtcgccgtaatcggggcgcatgattttctcgccgttgataacaatttcgccctgttcatacgtctccagcccaacaatcgccttcagcaattcactgcgccctgcccccagcaggccagcaatgccaagcacttcgccacgacgtagcgtaaagctgatatcctccagcttgggcttatggcgtaacgcacggacttccagtacggcctgatccacaatttcctgaggggctaccggcgcaatatcaacgtgatcacgccctagcattagcgacacaatatgatgcgtggaggtgttttcgagcatcacatcgcccgccacctgaccatcgcgcataacggtggcacaggaggcaatgcggcgaatttcttccatccggtggctgacataaatcaccgccacgcccagtgccgacatctttttcaccgcgctgatcaccagttcaacttccgcactcgcaagcgaactggtaggttcatcaagaatgaccacgcgcggctcgcccttcatcacccgcgcaatttccaccagctgcttttgcgccgggcttagcgttgaaacaagttgttcaggactaacgtcaacgcccagcgcctgtaagcaacgttgggcatcctgcgccatttgcaggtaatcaatcatgccgttgcggcggggccactgaccgaggcagaggttttccgccaccgtcagcccttccaccagacttaattcctgataaaccgcacgaacccccagttcagcggcacggcgagtcaacgtagcttcgtcaccttccagtcgcgtctcgccaatccagatatcaccgctatccgggcgttcgctgccggtaagcattcgaatgagagtcgatttgcccgcgccgtttttacctaacagcgcacgaacttcgcctttattgagcgtgaagttaacgttatccagcgcaacgacgccggggtaacgcttatttcctgccaccacttttgctaccgggactgcctctgttgccgtgaacatagggacctctgcgaatcagcgattagggcagaccatcaacgtgcgttgccagccactgtttaccatcttccgttttggtatagagatcgattggcacctgaatcactttttcaccgtcggcttgtttattgataaccttcaatgtttgcgcgaaaacagcattgcccattttcttaccggaaatatccactaccgctttcagcacctgattgttttccagctcctgagcaatttcggttgtcatatccgaaccgaaaacagcaatttttccggcctgattttgattacgtaccgcttttaccgcgccgagtgtcgcaccgcccgactcccccataatggcgttgagatccggcgtggagataatcagtttttcaccaacggaaatcgctttatctaaaacagtcccttcctgattagcgacaatttgcgcgccgggaacgcgggattttaatacttcttcaaatcctttacgtcgctgcacacaaacttcaaaggcttcgcaattgatgacggcaattttcggctggtcaattttattggcaataaaataatcggcggcagcgttacccagttttttaccaaattccagtggatcgccgaccagatacgccgagacatatttatcgacacccttttgattaatacaggtgttgtagcaaatcaccggaatacccgcttcactggcgcgacgaacggtacggctactgccattttcagacactgccgataaaataatggcatcgacattacgcgccacgagggtatcaacaaaggtactttctttcgaaatatcaccctgggcgttagtttcaattaactgtacctgtactgaagaatcttttgccgcatcctgaacgccctgacgcactccagcgtaatatccctgggtatcaaggtatattgcaccaatggtcatttctttatccgcagccctggcaaatagtgcgctacctaatagcgtagccattaataatagattacgggttgttctcatttttttaggcatagtgcctcctgtagggtttttattaacaacggcttattctaattattttgtgatgagcggcagcgcatgccgctcaaatattacagttaatagggtttagtgaacgtagttaaaaataaaaggcatcacggtggtgaataatgccgctttcggccaggccggattaatcgccgtcaattcagcgcgagcagattcatattgcgcaacctccccgagtcccgcggacgccagcatcgccaccatcaggcatttttctttatgctgctgttgtaaatcgccatacagcgacaacaggtcaggttgtgaaacagcaaagaaatccgcctcaatactggttttcgccatctcttgcgcccactgtttcatttcactaaacagttgctgtgcggtttgctgttcacccagcagtcgcagcgccattccttgccagaagagataatcaaccggctgatcgttgtaataactgtggatgttaatggtgcgatcgccggtcgccgccagacgtaaacaacgcatcgcttcagtttcatcgccctgcgcgttggcgcatatcgcctgccagaaccagatgtcgttatcagtttgccccggtaaacggccttcgcttaaattctccggataatgcagcgcggcatgaagcagttcgcaggcctgctgcggctgtctggcatcaagatgctgccaggcgcgtaataactggttgaggataaactgactggtgaccttcccttccccgccttcccacgggtggaatttgcgcgtggcgagaatgtccgccgctttgtctgcctgacccgtgagatgccacaaattgagcagttctgcggtcatgtcgtcgcgtttcagcgcaatttccagattattttccagacgcgccagtcgtttctccggtgtggctccacttaacttatccagcaaatcccgttcgaaaagcagacgtgcatcctgcggcgcaagctgataagcattatcaagataacgcgcggccagctcataatcgtgttgcttattccacgcatggatcgctaacccgcgccagccgtcggcaaactccggcgacatctctacgcaacgttgccaaaaggcaatggctttgttgtagctacgtttgttgtagtagaagcaagctagtaaatggcgagcaaaccagcactcttcaatactctccagcgccgccacttcttccagcgtattcgggaaacggacaaactgcgggaagacatcaatggcttttgcgaccagttcgccacgttcggctttcggcagcaagctggcttgcaggtaaagcggcagcgtgcgctggcagtccagtgcgttcagcatctctgccgccagggtgggcattccccagttaatcagttgcccggcggtcatcagggcgttaacgtcgcgtccctgacacagaccgcgccactgcgcgagagctgattcgctacgaccatcgaaccagttcagccaccacagagtggcgttcagcggataatcgcgcagcagtttctcgcgctgcacacgcgcgttgtcctgacgaccacttaacaccagcagcagattatgcaggcaaagcacttcctgattggttgggcaggcgcgaagactttgttggcaaaaatccagaccagcgtcgaagttaccattacgcgccgccagtcgtgccaggccataatagccaccggctttgctgttgccgctccagaccgcacgccagaaatcctcttcggcttgttgatattgtccctgacgttcgtaagcactggcgcgaatcaaactcgcctgtccgcactgcggatttttgttcagcgcatgtgcgcgtttcagagcctgagtggcatacgccaccgcttgcgggaaatctgcgcggttatattccagcatcgccagcgccaggttacagcgataatccagcgggtccagcgccacgccgcgcaggtagtaatcgaacggtgaacggctggcgtgatgatattgctccagatgctgaccgataaaccaggcttcatctgtactggtaatgtcttgtgctgccagtggcgctttggcgacgtccggtaacggcaacgcttgcggctgatgttcctgataactcagtacaatattgccgtcggcatcggagagctcaatggtcagcctttcaggattgataccgtgcaacacgccctggatggcggtcgcaggcatcagtgccacggcatcatcaagtaacgcgttgcatttaccgatttcgcggatcgccaggcggtatccgttcaacggagagatggcatacagcccccactcaatcccccgcttactacgctggagttttatcaccgcatcgcgggaggcattttgcaccatgcccaaagaatgataaggcaggaaatactgctcaaaacgcttctcttcgtaagcatcaagccaggtaaaatcgggctggttatcggcaaaaataccggtcatcagttcgatatacgggccgttattgtcggtcagactcttatcccacgcctggccaaattcactgtgtccccaactccactgttttttacctggcgcaatatggtggttggcaacgtgcagcaaaccgccatcttcatcgtgacaccacgcgccgacaaaatcgtactgcgatttttcggccatatatgaggttggaacaggcacatttttatagcgagaaatgtccactccagcggagtagtccactttgtagtaagtgccggtagcgatggggaaagcggagacggcccgtttgccgtgatcaaacaccgccgttacatccggcgggaagacgctctgatgcccttccccccctttcactgccgggttggcccaccacaagaaatgacgcggcgtggcgttcccgttatagacgcggctggcgatttccagcgccgcccggtcagggcgcagggtgaaacctgtcatcacctgtaaaccatgcatcggctccgtttcgcctacccacaccgtctgtgcaccgtcttcatgggcttcgagggtgaaatcaacgggcataaaggtggtcgggcgatgatgttgcggccagttaaactcaatcccaccggaaatccacggccccagcagccccaccagcgcaggtttaatgacttcattgtgataaacaaaatcgcgctgtttcactttatcccacgcgcgatgcacccgaccgcccagttccggcaggatcatcactttgatgtagtcgttttccagccacaccgcctgccaggatttcagggttttctgctcgctcagcgtatcggtcacgccgtagggataaaccgcgccggacgatccctgataaacgcgattttccaggaacatgggatgtatatcctgcggcccggtttcataggtcgggatctcaacgcgctcttgccacacttttactggagtcatggtgccctcaatattaacaagacatactgaattaaaagatttgtggcagtgtattgaacaatctggcaatgttttcgcggaataatcacgcaattaactaaacaaggtttagtgaagatgagagcctgcattaataatcaacagattcgccaccataacaaatgcgtgattctggaactgctgtaccggcaaaagcgcgccaataaatcaacgctggcccggctggcgcaaatttcgattccggcagtcagtaatattttgcaggaactggaaagcgaaaaacgggtggtgaatattgacgatgaaagccagacgcgcgggcatagtagcggtacatggctgattgcgccggaaggtgactggacgctgtgcctgaacgtgacgcccaccagtattgagtgtcaggttgctaatgcttgtttaagtccgaaaggtgaatttgagtatttacagattgatgcaccgacgccgcaggcgctgctgtccgaaatcgaaaaatgctggcatcgccaccgtaaattgtggccggaccataccatcaacctggcgttggcaatccacggtcaggttgagcctgtgaccggcgtgtcgcaaaccatgccgcaagcgccgtggacaacgccggtggaggtgaaatatctgctggaagagaagctcggcattcgggtgatggtcgataatgactgcgtgatgctggcgctggcggagaaatggcaaaataattcgcaggaacgggatttctgcgtgatcaacgttgattacggcattggctcgtcgttcgtgattaacgagcaaatttatcgcggcagtttgtatggtagcggacagattggtcacaccatcgttaatccggatggcgtcgtctgcgactgtggacgttatggctgcctggaaaccgtcgcctcgttaagcgcattaaaaaaacaggcgcgggtatggctaaaatcacaaccggttagtactcaacttgatcctgaaaaactgactacagcgcagttaatcgctgcctggcaaagtggagaaccgtggatcaccagctgggttgatcgctctgccaatgccattggtttgagtctgtataacttcctcaacatcctcaatattaatcagatttggttgtacggtcgcagttgtgcctttggtgagaactggcttaatactattattcgccagacaggatttaacccgttcgaccgcgacgaaggaccgagcgtgaaagcgacgcaaattggctttgggcaattaagccgcgcacaacaggtgctgggaattggctatttgtatgttgaggcgcagttacgacagatttgatggcgcgataacgtagaaagacttcccgaaggaagccttgatgatcataaacgaaaaattgcctgatgcgctacgcttatcaggcctacacggagattgcaatatattgaatttgcaaagttttgtaggccggataaggcgttcacgccgcatccggcatgaacaacgagcacattgacagcaaatcaccgtttcgcttatgcgtaaaccgggtaacgtgcgcagatgtcgagaactttacctttgatgcgctcgataacggcttcatcattgatgctgtccagcacgtcacacatccagccagccagttctttcgcttcggcttctttaaagccgcgacgggtaatcgccggagtacctacacgaataccggaggtcacaaacgggctcttcggatcgttcggtacgctgtttttgttgacggtgatgttagcacggcccagagcggcgtctgcttctttaccggtcaggtttttatcaaccagatcaaccaggaacaggtggttatcagtgccgccggaaaccactttgtagccgcgctcgaggaacacttctaccatcgctttagcgtttttagcgacctgctgctggtaagttttgaactcaggctccatcgcttctttcagagcaaccgctttaccggcgattacgtgcatcaacggaccgccctgaccaccagggaaaacggcagagttcagttttttgtacagctcttcgctaccacctttcgccaggatcaggccgccgcgcggacccgccagggttttgtgagtggtggtagtaacaacgtgagcatgaggaaccgggttcgggtagacgccagcagcaaccaggcccgcaacgtgcgccatatcaacgaacaggtaagcaccgatgctgtcagcgatttcacgcattttcgcccagtccaccacgccggaatatgcagagaaaccaccgataatcattttcggcttgtgttctttggcttgtttttccagatcggcgtagtcgatatgaccggtagcatcgataccgtaaggaacgatgttgtacagtttaccggagaagttaaccggagaaccgtgagtcaggtgaccgccatgcgccaggttcatacccagaacggtatcacctggttccagcagcgcggtgtagaccgcaaagttagcctgggagccggagtgcggctggacgttagcgtagtcagcgccgaacagttctttcgcacgatcgatcgccagttgttcaacgatatcaacatactcgcaaccgccgtagtagcgtttgcccggataaccttcagcatatttgttggtcagctgagaaccctgcgcctgcattacgcgcgggctggtgtagttttcggaggcgatcagttcgatgtgctcttcctgacgtactttttcctgctccatagcctgccacagttcggcatcataatcggcaatgttcatttcacgctttaacatccgcatctcctgactcagctaacaataaaatttttggcctttataggcggtcctgttggacaacggcgaacagtataaccgaatcattgtgcgataacaggtcttgacaaaggaatttacgcaaacgattaccttcaggctacgcaaggctttggagaataaagagcttgcaaccggaaacggatttcttttcaggtttgtgatgcaaatttttcacttcatcacattctttctgaaaaacaccaaagaaccatttacattgcagggctattttttataagatgcatttgagatacatcaattaagatgcaaaaaaaggaagaccatatgcttgacgctcaaaccatcgctacagtaaaagccaccatccctttactggtggaaacggggccaaagttaaccgcccatttctacgaccgtatgtttactcataacccagaactcaaagaaatttttaacatgagtaaccagcgtaatggcgatcaacgtgaagccctgtttaacgctattgccgcctacgccagtaatattgaaaacctgcctgcgctgctgccagcggtagaaaaaatcgcgcagaagcacaccagcttccagatcaaaccggaacagtacaacatcgtcggtgaacacctgttggcaacgctggacgaaatgttcagcccggggcaggaagtgctggacgcgtggggtaaagcctatggtgtactggctaatgtatttatcaatcgcgaggcggaaatctataacgaaaacgccagcaaagccggtggttgggaaggtactcgcgatttccgcattgtggctaaaacaccgcgcagcgcgcttatcaccagcttcgaactggagccggtcgacggtggcgcagtggcagaataccgtccggggcaatatctcggcgtctggctgaagccggaaggtttcccacatcaggaaattcgtcagtactctttgactcgcaaaccggatggcaaaggctatcgtattgcggtgaaacgcgaagagggtgggcaggtatccaactggttgcacaatcacgccaatgttggcgatgtcgtgaaactggtcgctccggcaggtgatttctttatggctgtcgcagatgacacaccagtgacgttaatctctgccggtgttggtcaaacgccaatgctggcaatgctcgacacgctggcaaaagcaggccacacagcacaagtgaactggttccatgcggcagaaaatggcgatgttcacgcctttgccgatgaagttaaggaactggggcagtcactgccgcgctttaccgcgcacacctggtatcgtcagccgagcgaagccgatcgcgctaaaggtcagtttgatagcgaaggtctgatggatttgagcaaactggaaggtgcgttcagcgatccgacaatgcagttctatctctgcggcccggttggcttcatgcagtttaccgcgaaacagttagtagatctgggcgtgaagcaggaaaacattcattacgaatgctttggcccgcataaggtgctgtaatttgatgttgccggatggaaacatccggcaacccttgacgcggtttaaattgccgcgtcgtcctcttcaccggtacggatgcgaatgacccgtgccacgtcaaagacgaagattttaccgtcaccgattttgccggtttgcgccgtgcgaataatggtatcgacacaggtatcgacaatgtcgtccggtacgacaatctcaattttcactttcggcagaaaatccaccatatactccgcgccgcggtacagctcggtatggcctttctggcgaccaaagcctttcacttcggtcaccgtcatgccggtaataccgacttcggccagtgcttcgcggacatcgtccagcttgaagggttttataatcgcatcaatctttttcatgctattccttgaaaaggtcgcctgtcttttgatctgctaaacgtaacacataacgccaattcattccttgaaatcgtttgcatccagctcgtgtcgggaaagcagtttataaaattctgtccggttgcgccccgccattctcgccgcgtgggtgacgttgcctttggtgatttgcagcagcttacgcaaatagttgagttcaaactgattacgtgcctcaacaaaggttggcagcgccgtattttcaccctccagcgcctgctccaccagcgcatcactaatcaccggagatgaggtcagcgccacgcactgttcaatcacgttgaccaactggcgcacattacccggccagctcgcggtcatcaggcgtttcatcgcatcggtagagaacgcgcggacaaacggtttatgtcgctctgccgcctggcgcaacaggtgatttgccagtagcggaatgtcttctgtgcgctccgccagtgccggaattttcaggctgacaacgttgaggcggtaatagagatcttcgcggaattccccgcgcgccatcgcttttggcagatcacggtgagtggcagaaataatccgcacattgatatcaatatcgcggttactgcccagcgggcgcactttacgctcctgcaacacgcgcagcagtttgacctgtaacggcgcaggcatatcgccaatttcatcgagaaatagcgtaccgccttccgccgcctggaataaaccttcgcgattgctgacagcgccagtaaacgcgccacgcgcatgaccaaacagctccgactccagcaattgctcgggcaatgcgccacagttaatagcaataaatggtttgctattgcgcgggctggcgttgtggatagcctgggcgaaaatctctttcccggtgccgctctggccattaatcaaaacgctgacgtctgattgcgccaccagccgcgcctgttccagcaaacgcagcatcagcgggctgcgggtgacaattgcctcgcgccagcgttcatcggtggctggcgcggattgctccagcgcatcgtcaattgcctgatatagcgcatctttatcgacaggcttggtgaggaaactaaaaacgccctgctgtgttgcagcaacggcatcgggaatagaaccatgcgcggtaagaataattaccggcattcccggctgcactttctggatttcagcaaacagctgcataccgtccatttcatccatccgcaggtcgctgataactaaatctactttttcgcgattcagtacccgtaatccttcagcgccactttccgccgtgaccgcactgtagccttcgctggtcaggcgcaggccaagcagtttcagcaatcccggatcgtcatcgaccaataataaatgcgcaggtttatggctcatcaggagtgacctcatgggtggatggcgcgggcttttcactctcgtgcggcgtatccggcgagaaatttccagccggtttgcgggtcgagagctggcgttcaatatcggtcaggttttccagcttgcgggtggtgagttccagttgctgctgtagaacgtgatgttgctggcgcaatgtatccagctcgctgtcgctggactgctggagtttactgtaacgttggcgctcttccgccagttgcagttgcagcgcctgaccgtcgcgccagagttgatacagtgggcgaacctgtgccgggatctcggtacttaacgcttcaatacgcgcgaccagctggcggcgctcatacggcgtaattttggcgtcggcgagcaaaatcccttgtttaaaggtattttgccagctgccgtcgtcatattggcgagcttgctgacgcgactgcgcaggcattaaacgatcagcacaatccatcgcccgcagccagtaaagcggattggtttcggttgatttaccttgcagcgcccagatgtcgctacattcagtagaaagatagtcagccagttgataaaccggaattttttcttctgctggcgtatcaatggctggcttattgtgattctgcacgcaacccagcaatgccagacatggcagccctgccagccacagccgtcggggcaataatcgttgaaaaatgtgtcgcatattcaccagacttaaagcctatcccagtgggcgtaattgttgcagacagtctggacatggacagcgcggagaaaccggagcgtacatatcgtacgtgaagatttcgagcactgcccggggccgaactgacaaataaaatagcctgataggataggctgttagcattatttcgtgtttttcgacgacggtaattcaatgcggaaacaaacgtcttgcccgctctcgtcgaccagatacagttccccttgcatacggcgaatacaatccctggcaatgcttaatcccagaccgctgcccttcaccgccccttttcgctggtggcttccctgaaaaaagggttcgaagatcatggcgcgttcctcttgcggaatgggcgtgcctgtattgatgacatcaatataaacccgcgcaccatgtaaactgctgcgaaggcaaatgttaccggattcagccccgtagtgcaccgcattggagtaaagattatccagtacgctcatcagcagcattggctccgccaggcaagctgttgctttgagatcgacgtcggtatgcatcattttagcccgtgcgggcaggctatgagcagaaaccactgtctccaccagcggtgctaactcaacattctccagttccaccgcactgtccgcctgtttacggttgtaatcaagcagttgttcgatcagtttttgcaaattgcggctgctgctatcaagaatgctcaccacctctttttgctctggcgtaagcggcccgacaacctggtcagccagtaattcagtgccctcgcgcatactcgccagtggcgtttttaattcatgagataaatgtcttaaaaattgatggcgttgggattccagccatgacaggcgctcacttaaccaaagaatacgttgcccaaccgagcgtaactcgctcggtccactgaacgagacgctattgcccagagaacgcccttcccccagacggttgatcatgcgctcgatatttttcaccggcccgataatcatccgcgtgaaaagcagtaccattaccagactcaccagaaatagcaccagcgattgccaaccaaaatattgcccacgttcggcgatttcacgctgaagctgctgcccacgagagaacaccactgtgcgcgtggcctgtaccatttcggtattggcactggcaaaggcttcaagacgtgcggcggcggcagcatcgggaccgctgttgttacactgaagttgagccagattgtgcaaatcctgacgtaatgcctggtagagtttatcgtccggcagcacgcctgcgtgggcatcgagcatttcgctgtaacgcttgcgctggctttgataaaccttcgccagggttgggtcgtccagcacgcaatactgacggtaactacgctccatctccagcgccgcgttggtcatcgcttcactgcgccgggcatcaataagcgtagtgcggttaaccagcgccgcctgatcgctaagcgcattcaggctttgccaggcttgccatgccagcaccaacaggggcagcagaatcagcaaaaatgccagcattaccagttgtcgtaatgagcggggaaaaacgggccagcgtttcaaggtgttactctcgtcagacgcgaatagcctgatgctaaccgaggggaagttcagatacaacaaagccgggaattacccggctttgttatggaataaggcggtgcctaactcgacgtttcgcccgatggttgatatagctacgctgatatcagaagttggacggcaggcaccttgttgtgcgtcattcgtattttatgtagcacgtcccgaaggggctgacataagtcggtgaatgagccactggttactattatgcagtaactgtgccaataaagaaaatagtttggtaacgtactgattatacgttgctttgaggggtttatgtctcctccgctgtttgaatgtaaatcagccactgtgtcgctaaaaagagacaacttaagataaacttattagatgacattaaaatcaatgagttaaacgtcaccaaaaagcgacacagcaaaccatccattgtcgtgatttacagacacaaaaaagctcccggagttgggagcttatgatagtggttggtgcttaatgccgcatccgggctgcaaaaccaatgggctgacgacttaccccaactgcttacgcgcattgcggaaaatacgcatccatgggccatcctcgccccagttttccggatgccaggagttgctgacagtacggaaaacacgttccgggtgcggcatcataatggtgactcgaccactttcagtcgtgaccgccgtaataccattcggagaaccgttcgggttagccgggtaggtttcagtgactttgccgaagttatcgacatagcgcagtgccaccagccctttgctttccagtgccgccagatgcgtcgcatcacgcacttccacgcgcccttcaccatgagagacagcaatcggcatttgcgagcccaccatcccctgcaacagcagagacgggctttgggttacttcaaccaggctgaaacgcgcttcaaagcgatcggaggtgttacgcacaaaacgtggccacaactcactacccgggatcagttcgcgcagattagacatcatctggcaaccgttacatacccccagcgccagcgtttgcggacggtggaagaaggttgcaaactcatcgcgtacacggtcattgaacaggatagacttcgcccaaccttcaccggcacccagcacatcaccgtaggagaaaccaccgcacgcgaccagggcgtggaaatcctccagtcccgtgcgtccagccagcagatcgctcatatgcacgtcgatagcatcgaagcctgcacggtggaaagctgccgccatttcaacatgcgagttcacgccctgctcacgcagtacggcaactttcgggcgcgcgccagtggcaataaacggtgcagccacatcttcgttgatatcgaacgacagttttacattcaggcccggatcggcgtcgtttgatttcgcctggtgctcctggtcagcacactccgggttgtcacgcaggcgctgcatctgccaggtagtttctgcccaccagacacgcaacgtggtgcggctttcgctgaatacagtctgcccgttggcggtaatcacaaaacggtcaccggaaaccgcctggccaacatagtggacgcaatcagcaagcccatgctgtgccagtaccgcttcaactgctttacggtcagcggctcgaacctgaatcaccgcacccagttcttcgttaaacaacgccgccaagcgatcgtcacccagagtggcgatatccgcgtcaatgccgcaatgaccagcaaaggccatttccgccagcgttaccagcaggccgccatcagagcggtcgtggtacgcgagcagcttacgctgtgctaccagcgcctgaaccgcgtcatagaaacctttcagttgcgcgacgtcgcgtacatctgccggtttatcgccaagctgacgataaacctgcgccagcgccgttgcgcccagcgcgttattgcctttgcccagatcaatcagcagtaatgcgttatcttcggtagaaagctgcggcgtgatggtgtgacgcacatcttccacacgggcaaatgcagaaatcaccagcgacagtggcgacgtcatttcgcgctcttcgttaccttcctgccagcgggttttcatcgacatagagtctttacccaccgggatcgtcaggcccagcgccggacaaagctcttcgcccacggctttaacggcttcatacaggcccgcatcttcaccagggtggcctgccgccgccatccagttggcggaaagtttgatgcgtttgatatcgccaatttgtgttgcggcgatgttggttaacgcttcaccgaccgccagacgggcagaggcggcgaaatccagcagcgcaaccggcgcacgctcgccaatcgccatcgcttcaccgtagtagctgtcgaggctggcggtagtgaccgcgcagttagcgaccggcacctgccacggccccaccatctgatcgcgcgctaccatgccggttacgctgcggtcgccaatggtcaccaggaaggttttttccgccacagtcggcagatgcagcacacgtttcaccgcgtctgcaatggtgatcccttcacgggccagcgcgtcgcctttcgctttcagcgtttgtacatcgcgggtcatcttcggcgttttaccaagcaggacgtccagcggcagatcgatcggctgattatcaaaatgacgatcgtgcagagaaagatgcagttcttcggtcgcttcaccaatcaccgcgtagggtgcgcgctcacgcttacacagttcgtcaaacagcggtaattgatcggcagcaaccgccagcacgtagcgttcctgggattcgttacaccagatttccagcgggctcatgcccggttcgtcgcttagaatctcgcgcagttcaaatttaccgccgcgcccgccgtcgctcaccagttccggcatggcgttagaaagaccgccagcgccaacgtcgtggataaacaggattgggttggcatcaccaagctgccagcaacggtcgatcacttcctggcagcgacgctccatctccgggttgtcgcgctgtacggaagcaaagtcgaggtcggcatcagactgaccagacgccatagaagacgctgcaccaccgccaagaccgatgttcattgccgggccgccgagaacgaccagcttcgcaccgacgttgatctcgcctttttgtacgtgatcggcgcgaatgttgccgatcccgcccgccagcatgatcggtttgtgataaccgcgcagctcttcgccgttgtggctgttcactttttcttcataagtacggaagtagccgttcagtgccggacgaccaaattcgttgttaaacgccgcgccgcccagcgggccttcggtcatgatgtccagcgcggtgacaatgcgctcaggcttaccgaaatcttcttcccacggctgttcgaagccaggaattcgcaggttggaaacggagaaaccaaccagacccgctttcggctttgcgccgcgcccggtggcaccttcatcgcggatttcaccgccggaaccggtcgccgcgcccggccacggagaaatcgccgtcgggtggttgtgagtttcgactttcatcagaatatgcgccggttcctgatggaaatcgtagcggcccgtttcgtggtcagcaaagtagcggcccacttcagaaccttccattacggcggcgttatctttataagcagagagaacgtgatctggcgtggtttcgaaagtatttttgatcatcttgaacagcgatttcggctgctgttcaccatcgataacccagtcggcgttaaaaattttgtggcggcagtgctcggagttcgcctgggcaaacatatacagttcgatgtcgttcgggttacgaccaagctttgtgaaagcatcctgcagatagtcaatttcatcttccgccagagccaagccaagacgcaggttagcgtcgatcagcgcctgacggccctgccccagcaaatcaacgctggtaaccggagtcggttgatggtgggcaaacaactgctctgcatcatctaaagcaaaaaagaccgtttccatcatgcggtcgtgcagttcagcggtaacctgctgccattgttcattggtcagcgtaccggcttctatatagtaagcaacgccgcgctcaaggcggtttacctgttgtagcccgcagttatgggcaatatcggtcgctttcgaagaccagggagagatggtgccaggacgcggggtcaccagcaggagtttgccttgcggggcgtggctggcgagtgccgggccatatttcagcaggcgttcaagttgtgcgtgctcatcatcgtttaacggcgcattgaggtcagcaaaatggacatactcggcgtaaatattgtgaaccgggagcctggcagcctgaaaacgtgccagcagtttgttgattcggaatgccgacagtgcaggcgaaccacgcagaatttccatcataagtctctcgtcttctaagctttcggtgtacccaagggggggaaacgggcgtcattataaagaatctgatgcgctgacgaaaccgtttgcgtggaaataaaatcaccatcgtgaattagcaacgcgtgccgccaatggctgtaataagttgccatctggcgcaggtttacgcaaaatgccgctcatttatgagtaaacctttcactattattacgttttttcaagctgggacgcgcacgacacagagaattaactaattgaaaaaattaaagattaattatctgttcatcggcattctggcactgctgctcgcggtcgctctctggccatccattccctggtttggtaaagccgacaaccgtatcgccgccattcaagcgcggggagagttgcgtgtgagcaccattcatactcccctgacttataacgaaatcaacgggaaaccttttggcctggattacgaactggcgaaacagtttgccgattacctcggcgtaaaactgaaagtgaccgtgcggcagaatatcagccagctgtttgacgaccttgataatggtaacgccgacctgctggcggcaggacttgtctataacagtgagcgggtaaaaaattatcagcctggccctacctattattccgtgtcacaacaactggtttataaagtgggtcagtatcgcccacgtacgctgggcaacctgacggcggagcaactcaccgttgcaccgggtcatgtggtggttaacgatctccagaccctgaaagaaacaaaattcccggaattaagctggaaggtagacgacaaaaaaggctctgcagaattaatggaagatgtcatcgaaggaaaactcgattacaccattgctgattctgtcgccatcagcctgtttcagcgcgttcacccggagctcgccgtagcgctcgatatcaccgatgaacaaccggtgacttggtttagcccgttagatggcgataataccctttccgccgccctgctcgacttcttcaacgaaatgaatgaagacggtacgctggcacgcattgaagagaaatacctggggcatggcgatgattttgattacgtcgatacgcgcacatttttacgcgccgtcgatgcggtactgccgcagttaaagcccctgtttgagaaatacgccgaagaaattgactggcgtttgctggccgctattgcttatcaggaatcgcactgggatgcacaggccacttcaccgacgggtgtgcgcggcatgatgatgttaaccaaaaataccgcgcaaagcctcggcattacggatcgtaccgatgccgaacagagcatcagcggtggcgtgcgttatttgcaggatatgatgagtaaagtgccggaaagtgtgccggagaacgagcggatctggtttgccctcgctgcgtacaatatgggctatgcgcatatgctggatgcccgcgccctgacggcaaaaaccaaagggaatcctgacagttgggctgacgtaaaacagcgtctgcctttacttagccagaaaccctattacagcaagctgacttacggctacgctcgtggacatgaagcctacgcttatgtcgaaaatattcgtaagtatcagattagcctggtgggttatctgcaagagaaagagaagcaggctacagaagcggcgatgcaactggcgcaggattatccggcggtatcgcctacggagttgggcaaagagaaatttccttttctctcgtttctttcccagtcgtcatcaaactatttgacccattctccctctctgctgttttccaggaaagggagtgaagagaaacaaaattaatccgtcgaggattgcgcttttttctgcgctttaatttcctggcggcgcatgcgaaagaagtcactgagcaacgccgcgcactcatccgccagtattccttccgtaatttccactcggtgattcatacccggatgatgcagcacatccattaaagatcccgcagcgccagttttcgcgtcacgcgcaccaaagaccacgcgaccaatgcgactgtggatcatcgctccggcacacattacacatggttcaagcgtgacatacaacgtggcgtcgatcagacgataattttgcatcaccagaccaccctgccgcagggccatgatttctgcatgtgcggtgggatcatggcgaccaatcgggcggttccagccttcgccgattacccgattgttatgcactaataccgcgccgaccggcacttcccgctcatcccaggcacgtttcgccagcgtcagcgcgtgacgcatccagtattcgtggctaaattcgacttcagacaaaaagaaaactccggttataaaagcgcggcgcattatacacggacgctatgctttactctattccagttgctggagttcaccgcgcggggttactcgccaacgatgctgacagaaataaagcagcggattgtcctgattactgtcgctatagccactgtacagccgcagcggagtgccgattttgcgctccagttgtgcgaccttttcatgtcccagacaacgcatcgtcaatacccaaccaccatagccacgctgaatttggctggcgataagattaacccgcggcagccagggcgtatcgaaataaaccgcttcaaccagcggctgcggagagccggtaatcaaccagatatcagcatcggaacttaacaggtaggtggttaatcgctcctgaaccagcggaaaggcggtaacattgtcgcgaaaccagcgcacgaaatcggcctgcaacgtctgtaaacgtgcttcgctgtgaccaaaagtgcacccccacagaagcagactcatcggccagcgtgccgcacgaccttttatcaataacgcaatggctataatcggtaacaacggcaggacaagtaacgcattcagcggttggcgacgtagtaaatagcgcagaaaactgccgaacatatcctgctgatgcaatgttccatctaagtcaaaaaacaccacacgacgctcgtgagttgccaaaccatactcctctggactgaaacatcctgattaattttcgctactacatagcctaacagatagatcatcacttttccggcaacaatcgaccgcatcatggctaactggaatttttaattcatggcaattagcggcaatggaatataaaattcactcgcgtgtgtctcatattgcctgttgtcgccactatttcatcgcgaggaaagatatgaacggcttacttcgtatccgtcagcgttaccaggggcttgcccagagtgataaaaaactggcggattatctgctgctacaacctgatacggcgcgccatttaagctctcagcaactggccaacgaagccggagtcagtcagtccagcgtcgtgaagttcgcgcaaaaactcggctataaaggttttccggcgcttaagttggcgttgagtgaagcgctggcaagccagccggaatcaccctccgtgcccattcataaccaaatccgcggtgatgatccgttacggctggtcggcgaaaaactgatcaaagaaaatactgccgctatgtacgcaacgctaaacgttaatagtgaagagaaactgcatgaatgcgtaacaatgttgcgctctgcgcggcggataattctgaccggtattggcgcttcgggtctggtggcgcaaaactttgcctggaagctgatgaagattggcttcaatgctgccgcagtgcgcgatatgcatgcgctactcgcaacagtacaggcgtcgtcccctgacgatctgttattagccatttcctacaccggtgtacgacgcgagttaaacctggcggcagatgagatgctgcgagtgggcggaaaagtgctggcgattaccggctttactccgaatgccctgcaacagcgtgcttctcattgcctgtataccattgccgaagaacaagcgacaaacagtgcttcaatctctgcttgtcacgctcagggaatgttaacggatttgctgttcattgcgctgattcagcaggatctggaactggcaccagaacgtattcgtcatagtgaagcgctggtgaaaaaactggtctgagtaaagaatgcgcgtataatgcccgcccggtttgtgttgttttgagagtttccttatggcgttgttaatcactaaaaaatgcatcaattgtgatatgtgtgaacccgaatgcccgaatgaggcgatttcaatgggagatcatatctacgagattaacagcgataagtgtaccgaatgcgtagggcactacgagacaccaacctgccagaaggtgtgcccgatccccaatactattgtgaaagatccggcgcatgtcgagacagaagaacagttgtgggataaatttgtgctgatgcaccacgcggataaaatttaatattctactctggaagtagagtattaattatattactgggaagccttaacgccattatatttatttaattgatgacattagcataatcattcactaagttaatttatatagtatctgcccagacacttatttatagttattaaaggtgcgtccgactggttcaccggacgcaccttaagtacgtttccttgtgttataagaacagaaggatcagctgtaaaacagcaatgatgattttgatgacccgtttaatcaggtatcggcaatcagtcattcgtttttccttaaacaaggaatgcagccattcagattagcccttacatctccccaaaactgaacgtgcgagttattgagggtgcatgctgcactccacaccagagttttgacgacaccactcgtttcaatgggggaattctgtggcatggtgtaaagcacagcaaaatcttcaataacgaagccaattttaatgtacttacgaattggcggtcacgttaatctttccatcaatattgctttcttcgtaaaggctcgagtttttatgctaaagattgcaagttgcttgtaaaagataagtacactgatccataatcgctgttgttgagggtgcatgctgcacaaaattaaagttaaaaagtaaaacccccgttccttaccagttcgggggttttactttttaaagagaacggtattatttttaactttcaataattaccgtggcacaagcatagtgccgctcatctgccagcgttacatgcatatttacaacaccgagcttttccgccagttttaatgcctcaccccatagccgtagccgtggtttgccgagctcatcattgaatacttcaaattgattaaacgccagaccattgcggatcccggtgccaaacgcttttgctgcggcttctttcacagcaaaacgcttcgccagaaaacgcaccggctggtggtgcgttttccagattgcccattcgttatcgcttaatacgcggcgtgccaggcgttcaccggatcgggcgatcactgcttctatgcgagcgatctctacgatatccgtgcctaaacctaatattgccattagccacgcgcttccagcatcagacgcttcatttctgccaccgcatctttcagtccggtcatcactgcacgaccaataatggcatgaccgatattcagttcatgcatctcagggatggcggcaatagctttcacgttgtgataggtcagaccgtgaccagcgttaactttcagaccgagactagcggcaaaggtcgcggctttggcgatacgcgccagctcttgcgcctgttcggcgtcagttttggcatcagcatagcaaccggtgtggatctcgataaacggtgcgccaacctctgccgcagctttgatctgctcttcatcggcgtcgataaagagagaaacctggatcccggcatctgccagacgtttgcaggcatcgcgcattttttcacgctgccctgcaacgtccaggccgccttcggttgttacttcctgacgcttttccggtaccaggcagcaaaaatgtggcttcgtctcaacggcgatcgccagcatctcttcggtcactgccatctccagattcatacgggtatccagcgtctgacgcaggatgcgcacgtcgcggtcagtaatgtgacggcgatcttcacgtaaatgcacggtaatgccgtccgctcccgcctgctcggcaataaacgccgcctgcaccggatccgggtaagcagtaccgcgtgcgttacgcagcgttgcaatatggtcaatgttgacgcctaacagtaattcagccatgacaatcctcatcattcataatgtgttttcaccgttcgcttaggcataaactgccggaacagttccctgctctttaatggtttaccgccaagatacggcttaagcgccatgcgggtaaagcgtttcgcggcgcgcagtgtgtctgcgtcaggaaattcccgcgcgtttaacgcttttaactgccttccggtgaacgttttattgtcgataacgacgcttgcgataaaccctttttcttcgcgataacgatacgtcatggtgtcatctaccggctcgccgctacccgcgcaatgggtaaaattgacgccatagcccagatgcccgagcagtgccagttcaaagcggcgcagcgcgggttctggcgtaccagtggcacctgcaagagactcaatgcagtgcaagtaatcgaaaaagagttcagagaagcgcgtctcgtattccagtacgcgggagagaagttcgttgatgtacagaccgctgtaaagcgtgataccgcttaatggcagcgccagcgagacagcttcagcactgcgcagcgttttgacttcgccacgcccgccgaaacgtagcaagagaggggtgaaaggctgtaatgcacctttcagagtagagcgtttagagcgtgcgcctttggcaaccagacgcacgcgacccgattcctccgtgaagacgtccagcatcaggctggtttcgctccacgggcgactatgcaggacaaatgcgcgctgccagccttccatcggagtaactcttaaagatcgtcaacgtaaccgagactgcgcagtgcgcgttcgtcgtcggcccaaccggatttcacttttacccacagctcaaggtgaacaggcgcttcgaacatttcctgcatgtctttacgcgcttcaatcccgatggttttgatcttggcccctttgttgccaataaccatcttcttctgcccttcacgctcaacgagaatcaaaccgttgatgtcataaccaccgcgttcgttagagacgaaacgttcgatctccacggtcacggagtacggcagttcagcgccgaggaaacgcatcagtttttcgcggatgatttcagacgccataaaacgctgtgagcgatcggtgatgtaatcttccgggaagtgatgagtcgcttcaggtagatgcttacgcacgattgccgcaatagtgtcaacattcagcccggtttcggcagagattggcacgatatcgaggaagttcatctggcttgccaggaactgcaggtgcggcagcagatcggctttctcctgcacgttgtccactttgttcaccgcgaggattaccggcgctttgccttcgcgcagtttgttgagcaccatttcgtcgtccggcgtccagcgggtgccttcaacgacaaaaatcaccagctcaacatcgccaatagagctgctcgccgctttgttcatcaggcggttaatggcgcgtttttcttccatatgcaggcccggtgtatcgacgtagatcgcctgatacgcgccttcagtatggatccccacaatgcggtgacgagttgtctgcgccttgcgggaagtgatggagattttctgccccagcagtttgttcaacaatgtggatttgccaacgttcggacgtccgacgatggcaataaatccgcagtaacttttatcgatgctcattccagctccagttttttcaacgcctgttcggcggcagcctgctcagccttacgacggcttgaacctgtgccaaccaccggttcactcaggccgctgacctggcagtggatagtaaattcctgatcgtgcgcttcgccacgtacctggactaccagataagtcggcagcggcagatggcgaccctgcaaatattcttgcaagcgcgttttcggatctttttgtttatcgcctgggctaatttcgtccaaacgagtttgataccagttgaggattaatttctcgacggtttgaatatcactgtcgaggaatacgccaccaattaatgcttcgacggtgtcggcgagaattgactcacgacgaaatccaccgcttttaagttcacctggccctaaacgtaagcactcgcctaactcaaattcgcgcgccagttccgccagcgtattgccacggaccagcgtggcgcgcatccggctcatatcgccttcatccacacgagggaaacggtgataaagcgcattggcgataacgtagctcagaatagagtcgcctaaaaattctaaacgctcgttatgtttactgctggcactacgatgagttaatgcctgctgcaacagttcctgatgattaaaagtgtagcccagcttccgttgaagccgattaattacgatggggttcatgcgataccaataaataaatgcgtcaacaattcagcacacgaaacagacctgatatacatggttctgctaactgcttcgctgcagtttcagtttaccggtatatggggaccaacgctgtttcgtgtgccgtggcaacctggaggtgccaaccttaaacttcgggggaatattctatacacaacgacgggggatgtcgttagccacgggagatttatctcataaataattcacgttgtcgccataacggcgacaacgtgaacgaagatggctattaatggatgccgccaatgcgacttaagcgcagaccagtcggccattcgccttcttgcttatcgaagctcatccagatagccgttgcccgaccgaccagattcgcttccggcacaaagccccagtaacggctgtccgcgctgttgtcgcggttgtcgcccatcatgaagtattgtcccggaggaacaatccaggttgccagttgttgccctggctgctggtaatacatccccacctgatcctgcgcaatcggcactgtcagaatgcggtgcgtcacatcacccagtgtctctttacgctcggaaagacgaattccattttctttggtttcgtttttcggcacttcaaagaatccgctggtcgcttccccaccattacggcgtgagaaggtctgaacgaaatcgctcggttccacgtttgagtaggtgaccggcagcgcgttttcacacgcctggccggaactgcatcccggttgaatcgtcagctcttttgagaccggatcgtaagtgactttatcgcccggtaaacccaccgcgcgcttgatgtaatcaagctttggatcttccggatatttaaagaccacgatatcgccgcgtttcggatgaccggtttcgatcagcgttttctggtagataggatctttaatgccataagcaaacttctctaccagaataaaatcaccaattaacagagtcggcatcatcgaacctgacgggatctggaacggttcataaataaacgaacgcacaatcaatacgatagccagtaccggaaaaacagaagcaccggtttccagccagccaggcttcggcgcaacctttttcaacgttgctttatccagtgagtccccggcagccgcctgcgccgctgcctgacgttcccgccgtttaggtgcgaaaaagaatttatccacgcaccataaaatgcccgtcaccagtgtggcaatcaccagaatcagggcaaacatattcgccatgccaactcctaagggttatttgttgtctttgccgacgtgcagaatggcgaggaacgcttcctgcggcagctcgacgttaccgatctgcttcatgcgtttcttaccttctttctgcttctgcagcagctttttcttacggctgatatcgccgccataacatttagccagtacgtttttacgcagctgtttcacggtggatcgcgcaatgatgtgcgtaccaatcgctgcctgaatggcgatatcaaactgctggcgtgggatcagatctttcatcttctccaccaactcgcgaccgcggttttgcgaattatcacggtgggtgatcaacgccagcgcatcaacacgttcaccgttgattaatacgtctacacgtaccatgtcggacgcctggaagcgcttgaagttgtaatccagagacgcataaccacgcgaggtagatttcaggcgatcgaagaagtcgagcaccacttccgccatcgggatctcgtacgtcagcgccacctgattaccgtggtaaaccatattggtctgcacgccgcgtttttctacgcacaacgtaataacgttgccgagatatgcctgcggcagcagcatgtgacactctgcaatcggctcgcgcagttcgtagatgttatttaccgcaggcagcttggatgggctgtcgacgtagataacttctcttgacgtggtttcaacttcatacactacggtcggcgcagtggtgatcagatccagatcgtattcacgttccagacgttcctggatgatctccatgtgcagcaggccgaggaagccgcagcggaaaccaaagcccagcgcgctggagctttccggctcatagaacagtgaggcatcgttcaggctgagtttacccagcgcgtcacggaaggcttcatagtcgtcggaacttaccgggaacagaccggcgtatacctgcggtttgactttcttaaagccaggcagcgccttttctgccggattacgcgccagcgttaaggtatcgccgactggagcgccgtggatatctttaatcgcacatacgagccagcctacttcgccacatttcagttcagtgcggtcaacctgtttcggcgtgaagatgcccagacggtcggcgttataggtctgcccggtactcatgactttcactttgtcgcccttacgcagggtgccgtttttaatacggataagtgaaacaacgcccaggtagttgtcgaaccatgagtcgataattagtgcctgcaacgggccttccggatcgccttccggcggcggaatgtcgcgcaccagacgttcgagaacgtcctgcacaccaacgccggttttcgctgaacagcgcaccgcgtcggtggcgtcgatgccgacgatatcttcaatttcttccgccacgcgttcaggatcggctgccggcaggtcaatcttgttcagtaccggcacaacttcgagatccatttccatggcggtgtagcagtttgccagggtttgcgcttctacgccctgcccggcgtcgaccaccagcaatgcaccttcacaggcagccagcgaacgggaaacttcataggagaagtctacgtggcccggggtgtcgataaagttaagctgataggtttcgccgtcagacgctttgtagtccagcgtcacgctttgcgctttgatggtaatgccacgctcacgctcaagatccatggaatcgagaacctgcgcctccatttcacggtcagacaggccaccgcagatctggataatacggtcagacagcgtcgatttaccgtggtcaatgtgagctatgatcgaaaagttacgtatattcttcataaagtatgattattgtgccttaatgcccggttaaccaggcttttagaagtcgctgttctgagcttaacgtctgtattaatagaaacgccgcattctacactacaacattgaggcgaggaaatgttcataccgtatggattgtggtatctggaaacgtcctcgcatttgttatgcaaaatgcaacaaagccagtgaaatcactggctcgcgtcttccgaagatgtttcaaatcgcacaaggccaggcggcaatgccacgcttaagatgatcggttgccattctgcccgggcagcaaacttacgcgagtagccacgcgcaatcaggaacccgccaataccgccgaggaccgcaccacataatgctgcgacgtcagaagcaaagagtagctgaaatagcgaagcgatgaggaataatcccaccagcggcgacatataaaccagtaatgcggagctaagcaggctgccttcggcgatccccaattccactttttgccccggcactaacggttcatcacagggtacgacaatggtatgcgtggtttgcgggccaagtttattcaacacgcggctaccgcaaccggcgcgtgaagcgcagctgctgcatgaggctttaacatcacaactgaccagcgcttgcccgttttgccaggagacgacggtagcccactctttgatcattgcgctgtcccgaacttaatattctcggcaatgcgtttcgccgtttgcggcggcagttcaccgacaatggtgatttcggcgttatcacgtacgcttgtactgacggttctgcgtccggtgcgcaacatctgatcggtgctcgatggcgtagcgcggttaacgtttaccgagaagctgaataatccgtcggaatagagacgtgattcgataggcatgttgtccatcgtcggtagcggacgtcgactactggaaacttcgctaaaaccctgtggcaaccaggttggcgtccagctgaatttagctttttcacctacaggaacagaaagcaacggcggcaaatttgccttcgccagcgtctgcatactgctgctgatatcctgattgacgttaaaagcaatcacgcgaaattgttccagcgtttcaccatcgcgatcaaggagatcaaccctcatcggtaatttcgattcggtgtccatccacacgatgtagctgtagcgtgtaccatctcgggcaaccacgcgaatgacttcgcaaagacgatcagcaatacgcgtgcgcccgacggagataaagtcgtagtaaggagaaaggcgtttgaaatcggtatagatgagcgatggcagagaatcaacaatgtaatcgccattaagcgtgaacggttcaagtcccggttcaaaatagctgatttcattgccgcgctgtaccacttcccggcgcgggccatccatttgcaacaattgtgcaagaggacggttatcgaggcgtgcatgtcgataacgcagagactcaacaccctgtttattgatgctgatgaatgacagctcgtaattcagtgactgactggccaggttcatctgctgtaacaacgccccggacgcgggagtggccgaggcgttagcagagaataacaggctacctgtcactaatgacatggcaaaccaaagttgcttcattactgcgattgcgttcctaaagtttgaattcctggcacctgtacagcggcttgctgggtttgcgcctgctcaaactgaagctgttcagagtggagtcggcgttgcagttcgtaatcctgcaacattgcattaatgcgacgacgctgctcctgtacctgctgctgttgaccattgtttgcggtcgcttcagaaggtactcccaggcttaccgggctggctttacccatcatcggcagtgtattaaataccggcgtttcgggctgctgggacgtttcagattgcccattatagtgctggacgccaacgataactgcaagcgatacgcatgcggctacgcccatttgggtaagctgtgccgcccacggacgtactttctgccagaatggcattttctgccattgatgcggcgcaggctgggcttccgggatcaatgtcgccggttgacgtactggctcttcttcaatggcggccatcacgcgtgaagagatatcgaaatggagcacctcgggagtatcaccccgcattgaatcacggattaagtgatagctttcccaggttttctgcatttctaggttatgagccagttcgttaagcagctcactatccagcgtttcgccatccattaaagcggaaagttgttctttctgcatgcctaatacccttatccagtatcccgctatcgtcaacgcctgataagcggttgaactttgttatcaatagcttccctcgctcggaagatacgtgaacgcaccgtacctaccggacaatccatgatagcggctatctcttcatagctcaggccatccagctcccgcaaggttattgccatgcgcaaatcttccgggagggactcaatagttcggaaaactatctgtctcagttcttctgacaacattaagttctcagggttcgaaatttctttcaacgcgccgccactttcgaagttttcagcttcaatggcatccacatcactggaaggtggacgacgcccctgagcaaccaggtaatttttcgctgtatttacagcaatccgatacagccatgtataaaaagcgctatctccccggaacgaatccagcgcacgataggctttaataaaagcttcttgtaccacatcgggaacatcacccgacggcacatagcgggaaaccagactcgccactttatgctgatagcgcactaccagtaagttaaaggctttctgatctcccttctggacccgttcaaccaggacctggtccgttaactgctcgctcatccgaggtaaagtctccccaaaccaaatttccacgcgctatcgaaacgccactccattagctgcaatttgagcaagcaaagggttagagtgtctcgtttttgtaaagttccgtaacgcatctgtttttgtttgtcatgctgtagacggatcattatctatcattataagtctacagaatctgaacatcgcattatctgtgtagaaatgcccatttaactgcctgaagagtaacccaacggcctttttatttcaccacctaatccttcaccagccagtaacttctctttttctcgccgccctgcgtcagcgtgtttagccactgtaacaaatattaaaatagcaggtgtttattcgcacaacatgatgctatgctgaccaaaccgtgtttagtaaattaaacaaagaaaatgaatactctccctgaacattcatgtgacgtgttgattatcggtagcggcgcagccgggctttcactggcgttacgcatggctgaccagcatcaggtcatcgttctaagtaaaggcccggtaacggaaggttcaacattttatgcccagggcggtattgccgccgtgtttgatgaaactgacagcattgactcgcatgtggaagacacattgattgccggggctggtatttgcgatcgccatgcagttgaatttgtcgccagcaatgcacgctcctgtgtgcaatggctaatcgaccagggggtgttatttgatacccacattcagccgaatggcgaagaaagctaccatctgacccgtgaaggtggacatagtcaccgtcgtattcttcatgccgccgacgccaccggtagagaagtagaaaccacgctggtgagcaaggcgctgaaccatccgaatattcgcgtgctggagcgcagcaacgcggttgatctgattatttctgacaaaattggcctgccgggcacgcgacgggttgttggcgcgtgggtatggaaccgaaataaagaaacggtggaaacctgccacgcaaaagcggtggtgctggcaaccggcggtgcgtcgaaggtttatcagtacaccaccaatccggatatttcttctggcgatggcattgctatggcgtggcgcgcaggctgccgggttgccaatctcgaatttaatcagttccaccctaccgcgctgtatcacccacaggcacgcaatttcctgttaacggaagcactgcgcggcgaaggcgcttatctcaagcgcccggatggcacgcgttttatgcccgattttgatgagcgcggcgaactggccccgcgcgatattgtcgcccgcgccattgaccatgaaatgaaacgcctcggcgcagattgtatgttcctcgacatcagccataagcccgccgattttattcgccagcatttcccgatgatttatgaaaaattgctcgggctggggattgatctcacacaagaaccggtaccgattgtgcctgctgcacattatacctgcggtggtgtaatggttgatgatcatgggcgtacggacgtcgagggtttgtatgccattggtgaggtgagttataccggcttacacggcgctaaccgcatggcctcgaattcattgctggagtgtctggtctatggctggtcggcggcagaagatatcaccagacgtatgccttatgcccacggcgtcagtacgttaccgccgtgggatgaaagccgcgttgagaaccctgacgaacgggtagtaattcagcataactggcacgagctacggctgtttatgtgggattacgttggcattgtgcgcacaacgaagcgccttgagcgcgccctgcggcggataaccatgctccaacaagaaatagacgaatattacgcccatttccgcgtctcaaataatttgctggagctgcgtaatctggtacaggttgccgagttgattgttcgctgtgcgatgatgcgcaaggagagccgtggactgcattttacgctggattacccggaactgctcacgcattccggtccatcgatcctttctcccggcaatcattacataaacagataaaaagcctgggtcagcgccgtatacgcttcggaatagttctggtctggcccacgaatgactaagcgatcgctaaagcattctcccgcctgcggggagaatgccagcaacacccgatgcggcagtcgcgcttcgttttccgccacatccgtccgcaaacgtaaatgccagcccatacttaatgccagctccgtaaaacttttaccaatctgctctggcagcaccacgcagaaaaatccctcttcggtaatgcactccgccgcgcaagtaagtaaagtctggtgatcaagtgaggtggtgtagcgcgcctgttcccgctgcggcgtcgcgcactccactccttgctcataatacggcgggttgctgatgattaaatcaaagcgcgcggtctgctgtgttacccactgctgaatatccgccgtatggacgttaattctctctgcccacggggactggttgatattttcctgcgcctgcgcggcagcttcactttccagttcaactgcatcaatcatcacgctgtcatcggttcgctgcgccagcattaatgccagcaacccgctacccgcgccgatatcaaggcaacgtttcaccccagccaccggtgcccatgcgcccagcaaaatgccatccgttcccactttcatcgcacaacgatcgtgagcaacaaaaaactgtttaaaagtaaatccattacgacgaagcacggatgtagactgtgacatgaaaataaaaccttgcaggaaaaacggcgatagcaccgggtgagaacaatacccgagaagcgatatccatacaaacagatgaagattgcagccgtaacgtctataatcagcgccccacacagaggtagaacatgactgtaacgactttttccgaacttgaactcgacgaaagcctgctggaagccctccaggataaaggtttcactcgcccgaccgccattcaggctgccgccattccgcctgcgctcgatggccgtgatgtactcggttctgcgccgacaggcaccggtaaaacggcggcgtatctgctgccagcgttgcagcacctgctcgatttcccacgtaagaaatccggtccgccgcgtattttgatcctcaccccaactcgcgagctggcgatgcaggtggccgatcatgcccgcgaactggcgaaacatacgcatctggatatcgccaccatcaccggcggcgtagcctatatgaaccacgcggaagtgttcagcgaaaaccaggacatcgtggtcgccacgaccgggcgtctgctgcaatacataaaagaagagaacttcgattgccgcgcagttgaaacgctgatcctcgacgaagctgaccgtatgctggatatgggcttcgctcaggatatcgaacatattgctggcgaaacgcgctggcgtaaacagaccctgctcttttcggcaacgctggaaggcgatgcgattcaggactttgccgagcgtctgctggaagacccggtggaagtttctgccaatccgtccacccgtgagcgcaaaaaaattcatcagtggtattaccgcgccgatgatcttgagcataaaaccgcgttgctggtgcatctgttaaaacagccggaagcgacccgctcaattgtgtttgtgcgtaagcgtgaacgtgtgcatgagctggcaaactggctgcgcgaagcgggcatcaacaactgctatctcgaaggtgagatggtacaaggcaagcgtaacgaagcgatcaagcgtttgaccgaaggtcgcgtaaacgtactggttgcaaccgatgttgccgcgcgcggtatcgacattcctgacgtcagccacgtctttaacttcgatatgccgcgcagtggtgatacttatttgcaccgtatcggacgtaccgcgcgcgccggtcgtaagggaacagcgatttcgctggttgaagctcatgaccatctgctgctgggtaaagtaggccgctatattgaagagccaattaaagctcgcgttattgatgagttacgcccgaaaacgcgtgcgccaagcgaaaagcagaccggcaagccatcgaagaaagtactggctaaacgtgctgagaagaaaaaagctaaagagaaagagaagccgcgggtgaaaaaacgccatcgcgacaccaaaaatattggtaagcgccgtaaaccaagcggaacgggcgtgccaccgcaaacgacagaagagtaatctcaatgccaggtttaagcctggtattaaaagtgctggcaaacgcaaaactgcctgatgcgctacgcttatcaggcctacgtggctcatgcaatatattgaatttgcacgatcttgtaggccggataaggcgttcacgccgcatccggcatgaataaagcgcactttgtcgacaagttaaatgccgggtttaatcccgacattatttttatccagccacaaaactctcttcaacacactgaataaaagtgtgcatcgccgggctaaccgcttttccagcatggtgtgcgcacatggccgtaatggtctgcgactgttcgccaaaaggcaattcaattaattctccgctctcaagctctttttcgaccgcaaagcggggcaagtaactgacaccgatattcgccgcgacacaacgtttgatactttcaatgcttaacagctcaatggtgttttccaccgtgctccgccgctggcgcaatgtactttcaaagatctgccgaaagacacattgcggttcgttgataataaagctacaggcgttatgtcttcccggctcagtaaaatcgacatctgcaatttgcggtgaagccaccagcaccagcgattgttcacccaactctcgtcggttcagggcatcatcattccctacgcgataaaagacgccgacatcggcctcatcattcagtagcgcatcacggatcacgtaacagttcagcgactgcaacgataaacgcacttttggtgcgcgttgccgaaaacgctgcaacacctgcggcattcggtaagagagcaacgtttcgcccgaaacaacgcgtagttccccgtccggatctgactcctttttggcagcctcacgaagcgtatccatcactcgggtaagttcataaatgtgcggcagcaacttttttccttcgcgggtaaggcacatccgtcggccaattttctcaaataactggactgaaaactcctgctcaagctgctgaatatgaaaagtcaccgtcgattgtgtacagcacaatttttgcgaagctcgcaaaaaggaaccctcttccaccacggttttaagtgtaataaaacggcgcagatccataaccccaaacctatcgaaaatatcgaatttagaatgtaaaaacattcatttttttaaatgttccgtgtcgggtactgtctaccaaaacagaggagataacaagtgacaccgacccttttaagtgctttttggacttacaccctgattaccgccatgacgccaggaccgaacaatattctcgcccttagctctactacgtcgcatggatttcgtcaaagtacccgcgtgctggcagggatgagtctgggatttttgattgtgatgttactgtgtgcgggcatttcattttcactggcagtgattgacccggcagcggtacaccttttgagttgggcgggggcggcatatattgtctggctggcgtggaaaatcgccaccagcccaacaaaggaagacgtacttcaggcaaaaccaatcagcttttgggccagctttgctttgcagtttgtgaacgtcaaaatcattttgtacggtgttacggcactgtcgacgtttgttctgccgcaaacacaggcgctaagctgggtagttggcgtcagcgttttgctggcgatgattgggacgtttggcaatgtgtgctgggcgctggcggggcatctgtttcagcgattgtttcgccagtatggtcgccagttaaatatcgtgcttgcactgttgctggtctattgcgcggtacgcattttctattaacgaaaaaaagcggaagaagtcgccctcttccgcttaataacttgctacttaagccttacaggctttcagtaaaggtacgagcaataacgtcgcgctgctgttccggagtcagagagttaaagcgaactgcatatccggatacacggatggtcagctgcggatatttttccggatgcttaactgcatcttccagagtttcacgacgcagaacgttaacgttcaggtgttgaccaccttcaacgcgaacttctggtttcacttctactggaacttcacggtattcaatgtcacccagtttgcttactgcaaccacttcatcttctgcataacctgcttttgcaacgatgcaacgtgcttcgcctttttcgctgtccagcagccagaaagagttcagcagatcgtcgttagcggctttagtaatctggatacctgtaatcatgtgatgcctccccggcaaaattatttgatttgttcagcctgtcgcggccaattggtaaaaccattgttgcttgagtgtatatttactcctcaaccacccttgattctttgatttaaatcaataaaaaccacacatcgattgtggtcacaaatggattttattgttttacatcaacttatgcgggtgtgaaattttaccaatttacatttttttgcactcgtttaagtctaaaaaatgagcatgattttgttctgtagaaagaagcagttaagctaggcggattgaagattcgcaggagagcgagatggctaacgaattaacctggcatgacgtgctggctgaagagaagcaacaaccttattttcttaatacccttcagaccgtcgccagcgagcggcagtccggcgtcactatctatccaccacaaaaagatgtctttaacgcgttccgctttaccgagttgggtgacgttaaagtggtgattctcggccaggatccttatcacggaccgggacaggcgcatggtctggcattttccgttcgccccggaatcgccactcctccgtcactgctgaatatgtataaagagctggaaaatactattccgggcttcacccgccctaatcatggttatcttgaaagttgggcgcgtcagggcgttctactgctcaatactgtgttgacggtacgcgcaggtcaggcgcattcccacgccagcctcggctgggagaccttcaccgataaagtgatcagcctgattaaccagcatcgcgaaggcgtggtgtttttgttgtggggatcacatgcgcaaaagaaaggggcgattatagataagcaacgccatcatgtactgaaagcaccgcatccgtcgccgctttcggcacatagaggattctttggctgtaaccattttgtgctggcaaatcagtggctggaacaacgtggcgagacgccgattgactggatgccagtattaccggcagagagtgagtaaatttgcgggaaaatgccggatggcagcgttgccacccggctgatttatcaggctttattctgacgccaccattcaccaagcaaaacgccagttgcgacagagatattcagtccggcaacgttgccagtaccatcaatcttcacgcgcagatcgttcggatcgcgtgcggcatccggtaacccttcatattcctgacccagcaccagtaccattttcgctggcagactggttttgaacagcggtttaccctgctcgctggaagttgtcactacggtgtaacccgcctgacggaaatcatccagcacgttaacaatgttgtcgccagtaatcggctgaacgtgctctgcgccgccttctgcggtacggatagccgcacccgactccagcagtgccgcatcctgcaccacaacacctttcacgccgaagtgcgcgcagctgcgcatcatgccacccaggttatgcgggttagattcgttttccagtgccagaacacaatcctgcgcacctgcctggcttacccactgctgcacggttgtgccattacgctttttgatcaggaagcaaacgccgccgtgatgttccgtgcctgacgcttttgtcaattccgcttcatccaccacatggtacgctttgcggtttgccgccatccagcgcaaggcttctttaaaacgtggcgttacgctctggataaaccaggcgcgaacaatcgcttccggacggctctggaacagtgcctgacatgcattttcgccgtagacgcgggtttcttccgcacgctgacgacgcaaaacttctggatcaataaaacttttaccactgatgccaccgtgatcggccttttccggcgtctcatcacccggcgcgcgggaaaccgtgcgccacggcgaatcttcccacttgcggtcacggggctgactctgtttgtcatcgcgggcggagcgacggccaccgtcagcacgagattttcctggacgcccgccccctttcccggtacgcgggttgtgggtacgtttatcagaatcatcatcactgcggacatacatcactttgaccttgccgcttttacctttcatttcatcgttcatgcttttctccaccagcgctgcgcgaagcgcgcagattacccgaagtccgcgcggttcgccatgatttcgtaccaaagcctgcgactatcatacctattgaataaaacagattgttgtctggaacaatgtccccgataatatgtaacatattagaaacataccggcgtcgttgccgataagtctccttactcatcccgaggttagttatgaataccgtttgtacccattgtcaggccatcaatcgcattcccgacgatcggatcgaagatgcggcaaaatgcggacgctgcggtcacgacttgtttgacggagaggtgattaatgcgaccggtgaaacactcgacaaattgctgaaggatgatctacctgtggtgatcgacttctgggcaccgtggtgcggcccctgccgtaatttcgcaccaatttttgaagatgtcgcgcaagagcgtagcggtaaagtgcgctttgtgaaagtgaataccgaagctgaacgtgaattgagcagtcgctttggaattcgtagtataccgacgatcatgattttcaaaaacggtcaggttgtcgacatgcttaatggcgcagtaccgaaagcgccgttcgatagctggctgaacgaatctctttaatcttaccggggcgcatcttgtgccccgttttctcctctgcgacaatggcgttttttcgacgctctcttatgaccgaaaacgctgttctccagttacgcgccgagcgtattgcgcgcgcaacacgtccttttcttgcccgcggtaatcgcgttcgtcgctgccaacgctgtcttttgccagagaaattatgtctctgttcgacaattaccccagcacaagcaaaaagtcgcttctgtttgctgatgttcgacaccgagccaatgaagcccagtaataccgggcgtctcattgctgatattttgcctgataccgttgcgtttcaatggtcgcgtaccgaaccctcgcaggatttgctggagttggtgcaaaacccggactatcagccaatggtggtctttcccgcttcgtatgctgatgagcaacgggaagtgatcttcacaccacctgccggtaagccaccgctgtttatcatgctcgatggtacctggccggaagctcgcaagatgtttcgtaaaagtccgtatctggataatcttcccgtcatttccgtcgatctttcccggctttctgcctatcgcctgcgtgaagcccaggctgaaggccaatattgtactgccgaggtagccatcgcactgttagatatggccggcgataccggggcggcggcagggttaggcgagcattttacccgctttaaaacacgctatctggcaggaaaaacgcaacatctgggtagcatcacagcagaacagttagaaagcgtttaaaatcattcggtcacttctgcgggagaccggtatgagtcagcgaggactggaagcactactgcgaccaaaatcgatagcggtaattggcgcgtcgatgaaacccaatcgcgcaggttacctgatgatgcgtaacctgctggcgggaggctttaacggaccggtactcccggtgacgccagcctggaaagcggtgttgggtgtgttggcctggccggatattgccagcttgccctttacacccgaccttgcggttttatgtaccaatgccagccgtaatcttgctcttctggaagagctcggcgagaaaggctgtaaaacctgcattattctttccgccccggcatcgcaacacgaagatctccgcgcctgcgccctgcgccataacatgcgcctgcttggaccaaacagtctgggtttactggctccctggcaaggtctgaatgccagcttttcgcctgtgccgattaaacgcggcaagctggcgtttatttcgcaatcggctgccgtctccaacaccatcctcgactgggcgcaacagcgtaagatgggcttttcctactttattgcgctcggcgacagcctggatatcgacgttgatgaattgcttgactatctggcacgcgacagtaaaaccagcgccatcctgctctatctcgaacagttaagcgacgcgcgacgctttgtttcggcggcccgtagtgcctcgcgtaataaaccgattctggtgattaaaagcggacgtagcccggcggcacagcgactgctcaacacgacggcaggaatggacccggcatgggatgcggctattcagcgtgccggtttgttgcgggtacaggacacccacgagctgttttcggcggtggaaacccttagccatatgcgcccgctacgtggcgaccggctgatgattatcagcaacggtgctgcgcctgccgcgctggcgctggatgccttatggtcacgcaatggcaagctggcaacgctaagcgaagaaacctgccagaaactgcgcgatgcactgccagaacatgtggcaatatctaacccgctcgatctacgcgatgacgccagcagtgagcactatattaaaacgctggatattctgctccacagccaggattttgacgcgctgatggttattcattcgcccagcgccgctgctcccgcaacagaaagcgcgcaagtattaattgaagcggtaaagcatcatccccgcagcaaatatgtctctttgctgacgaactggtgcggcgagcactcctcgcaagaggcacgacgtttattcagcgaagccgggctgccgacctaccgtaccccggaaggaaccatcactgcttttatgcatatggtggagtaccggcgtaatcagaagcaactacgcgaaacgccggcgttgcccagcaatctgacttccaataccgcagaagcgcatcttctgttgcaacaggcgattgccgaaggggctacgtcgctcgatacccatgaagttcagcccatcctgcaagcgtatggcatgaacacgctccctacctggattgccagcgatagcaccgaagcggtgcatattgccgaacagattggttatccggtggcgctgaaattgcgttcgccggatattccacataaatcggaagttcagggcgtcatgctttacctgcgtacagccaatgaagtccagcaagcggcgaacgctattttcgatcgcgtaaaaatggcctggccacaggcgcgggtccacggcctgttggtgcaaagtatggctaaccgtgctggcgctcaggagttgcgggttgtggttgagcacgatccggttttcgggccgttgatcatgctgggtgaaggcggtgtggagtggcgtcctgaagatcaagccgtcgtcgcactgccgccgctgaacatgaacctggcccgctatctggttattcaggggatcaaaagtaaaaagattcgtgcgcgcagtgcgctacgcccattggatgttgcaggcttgagccagcttctggtgcaggtttccaacttgattgtcgattgcccggaaattcagcgtctggatattcatcctttgctggcttctggcagtgaatttaccgcgctggatgtcacgctggatatctcgccgtttgaaggcgataacgagagtcggctggcagtgcgcccttatccgcatcagctggaagaatgggtagaattgaaaaacggtgaacgctgcttgttccgcccgattttgccagaagatgagccacaacttcagcaattcatttcgcgagtcaccaaagaagatctttattaccgctactttagcgagatcaacgaatttacccatgaagatttagccaacatgacacagatcgactacgatcgggaaatggcgtttgtagcggtacgacgtattgatcaaacggaagagatcctcggcgtcacgcgtgcgatttccgatcctgataacatcgatgccgaatttgctgtactggttcgctcggatctcaaagggttaggcttaggtcgacgcttaatggaaaagttgattacctatacgcgagatcacggactacaacgtctgaatggtattacgatgccaaacaatcgtggcatggtggcgctagcccgcaagctcgggtttaacgttgatatccagctcgaagaggggatcgttgggcttacgctaaatcttgcccagcgcgaggaatcatgagtaaggtactggaaatgttgaccacttaatcgggactggtgttattattgcccgcttatgtcgtctgcattgcacagaggacccttcaatgaacagagaagaaatgcactgtgatgttgtcaaaatttaagcgtaataaacatcaacaacaccttgcccaactacccaagatttctcaatcagttgatgatgtcgatttcttttacgctcccgccgacttccgggagacgctgctggaaaaaatagccagcgcgaagcagcgcatttgcattgtcgccctgtatctcgaacaggatgacggtggcaaaggcattctgaacgcgttgtatgaggctaaaaggcagcgtccggaactggatgtgcgggtgctggtcgactggcatcgtgcacaacgtggacgcattggcgctgcggcatctaacactaacgctgactggtactgccgcatggcgcaggaaaatccgggcgtagatgttccggtttatggcgttccaatcaatactcgtgaagcccttggtgttctgcactttaaaggctttatcatcgacgatagcgtactttatagcggtgccagcctgaacgatgtttacctgcatcagcacgataaatatcgctacgaccgttatcatctgatccgtaaccgtaagatgtcagacattatgtttgaatgggttacacagaatattatgaatggccgcggcgttaatcgtctggatgatgttaatcggccaaaaagcccggaaatcaagaacgatattcgtctgttccgccaggagctgcgtgatgccgcttatcatttccagggcgatgccgacaacgatcagctttctgtaacgccgctagtggggctggggaaatcgagtctgttgaacaagaccattttccatcttatgccttgtgccgagcagaaactaaccatctgtacgccatacttcaacctgccagcaatccttgtgcgcaatattatccagttgctgcgcgaagggaaaaaggtcgaaattattgttggtgataaaaccgcgaatgacttctacattccggaagatgaacctttcaagataattggcgcattgccttatctctatgagatcaatctgcgtcgtttcctgagccgtttgcagtattacgtcaatactgaccagctagtggttcggttatggaaagatgacgacaacacctatcacctgaaagggatgtgggttgatgataagtggatgttgatcaccggtaataacctgaacccgcgcgcctggcgtctggatctggaaaacgccattttgatccacgatccgcaacttgagctggcgccacagcgagagaaagaactggagctgatccgcgagcataccaccatcgttaagcactatcgcgatctgcaaagtattgccgattatccggtgaaggttcgtaaactcatccgccgtttgcgccgtatccgcatcgaccgattaattagccgcatcctgtaatcacaaccccgtcctgtacggggtttgttttttggaggccacgttttgcgtattctttttgtctgttcgctattgttactttctggatgcagccatatggctaacgatagctggagcgggcaggataaagctcaacactttatcgcctcggcgatgctttccgccgccggaaatgaatattcacagcatcaggggatgagccgggatcgcagtgccatgtttggattgatgttctctgtcagtttgggggcgtcaaaagagctttgggatagccgccccgaagggagcggctggagctggaaggatttggcctgggatgtcgccggtgcaagcaccggctataccgtctggcaactgacccgtcactaaagacgcatccccttccctttgcgatgtagcatcaaagaaaccagaaacgccaccacggccatcaaggtcacataccagaagaaggctgtttccattcctattgatttcagcgacaacgctacgtactccgccgaaccaccaaatatagcattagcgaccgcatatgacagaccaacgcctaatgcgcgaacctgtgccgggaacatctcagccttcagtattccactgattgatgtataaaaactcactatcagcagggcacacatcaccagaccaaaagcggcataaggcgaggaaacgttttgcaatgctgagagaataggaacggtaaaaatggctgccagcgaaccgaaacataacattgaggtacggcgaccaatcttatccgacagcgcgccaatgagtggttgaataagcatgaatacaaacaatgcggcagtcataatgccactcgccacgttggcatgcattcccgcagtatttaccagatacttctgcatataagtagtgaaggtatagaaacaaagggagcccgcagcggtaaaaccgagaaccatgatgaatgcacggcgattgcgccataatcctttcagagatccagcttcttttaaagcgcgcgtttcttgttgcgaagtttcatctaactgacgacgtaaccacaacgccacaacagctaacacagctcctaacgcgaaaggaatacgccatccccactctctgagtgcagcgtcttccatggtgtgttgtaaaaccacgacaaccagtagggctagcagttgtccgccgatcaacgtcacatactgaaatgatgcgtaaaaacctttgcgcccttcaacggcaacttcactcatataggtggcgctggtgccatattctccgccaacagataatccctgaaataaacgagcgagaagcaataatgccggagcccacgtacctatagtttcataacctgggaggcaggcgataaccagcgatccgaaacacatcatacacaccgataacagcatcgattttttgcgaccatgtttatcggctatgcggccaaatagccaaccgcctattgggcgcatcaggaatcccgcagcaaaaacacctgctgtttgtagtagttgagtcgtcgtgttcccggaagggaagaagatgtgggcaaagtagagtgaacagaacgagtagacatagaaatcgaaccactcgaccagattacctgaagaggcccccacaatcgcccaaatgcggcgacgagtatcactacttgtcagtttgctgtctgccgttacagtactttcagccatgccattatgtctcctgccgtaatccgatgcttttgtcggtcgcttttgtttattttttttggtaaaggaaatgttatacatttgttgcatatcattatgcaaccttaaccatgaatttagttagcaggaaaatggttattgaggagcttaaggataaatttctggtaaggaggacacgtatggaagtgggcaagttggggaagccgtatccgttgctgaatctggcatatgtgggagtataagacgcgcagcgtcgcatcaggcatttttttctgcgccaatgcaaaaaggccatccgtcaggatggcctttcgcataatttgatgcctggcagttccctactctcgcatggggagaccccacactaccatcggcgctacggcgtttcacttctgagttcggcatggggtcaggtgggaccaccgcgctacggccgccaggcaaattctgttttatcagaccgcttctgcgttctgatttaatctgtatcaggctgaaaatcttctctcatccgccaaaacakcttcggcgttgtaaggttaagcctcacggttcattagtaccggttagctcaacgcatcgctgcgcttacacacccggcctatcaacgtcgtcgtcttcaacgttccttcaggacyctyaargrgtcagggagaactcatctcggggcaagtttcgtgcttagatgctttcagcacttatctcttccgcatttagctaccgggcagtgccattggcatgacaacccgaacaccagtgatgcgtccactccggtcctctcgtactaggagcagcccccctcagttctccagcgcccacggcagatagggaccgaactgtctcacgacgttctaaacccagctcgcgtaccactttaaatggcgaacagccatacccttgggacctacttcagccccaggatgtgatgagccgacatcgaggtgccaaacaccgccgtcgatatgaactcttgggcggtatcagcctgttatccccggagtaccttttatccgttgagcgatggcccttccattcagaaccaccggatcactatgacctgctttcgcacctgctcgcgccgtcacgctcgcagtcaagctggcttatgccattgcactaacctcctgatgtccgaccaggattagccaaccttcgtgctcctccgttactctttaggaggagaccgccccagtcaaactacccaccagacactgtccgcaacccggattacgggtcaacgttagaacatcaaacattaaagggtggtatttcaaggtcggctccatgcagactggcgtccacacttcaaagcctcccacctatcctacacatcaaggctcaatgttcagtgtcaagctatagtaaaggttcacggggtctttccgtcttgccgcgggtacactgcatcttcacagcgagttcaatttcactgagtctcgggtggagacagcctggccatcattacgccattcgtgcaggtcggaacttacccgacaaggaatttcgctaccttaggaccgttatagttacggccgccgtttaccggggcttcgatcaagagcttcgcgttaccgctaaccccatcaattaaccttccggcaccgggcaggcgtcacaccgtatacgtccactttcgtgtttgcacagtgctgtgtttttaataaacagttgcagccagctggtatcttcgactgatttcagctccatccgcgagggacctcacctacatatcagcgtgccttctcccgaagttacggcaccattttgcctagttccttcacccgagttctctcaagcgccttggtattctctacctgaccacctgtgtcggtttggggtacgatttgatgttacctgatgcttagaggcttttcctggaagcagggcatttgttgcttcagcaccgtagtgcctcgtcatcacgcctcagccttgattttccggatttgcctggaaaaccagcctacacgcttaaaccgggacaaccgtcgcccggccaacatagccttctccgtccccccttcgcagtaacaccaagtacaggaatattaacctgtttcccatcgactacgcctttcggcctcgccttaggggtcgactcaccctgccccgattaacgttggacaggaacccttggtcttccggcgagcgggcttttcacccgctttatcgttacttatgtcagcattcgcacttctgatacctccagcatgcctcacagcacaccttcacaggcttacagaacgctcccctacccaacaacgcataagcgtcgctgccgcagcttcggtgcatggtttagccccgttacatcttccgcgcaggccgactcgaccagtgagctattacgctttctttaaatgatggctgcttctaagccaacatcctggctgtctgggccttcccacatcgtttcccacttaaccatgactttgggaccttagctggcggtctgggttgtttccctcttcacgacggacgttagcacccgccgtgtgtctcccgtgataacattctccggtattcgcagtttgcatcgggttggtaagtcgggatgacccccttgccgaaacagtgctctacccccggagatgaattcacgaggcgctacctaaatagctttcggggagaaccagctatctcccggtttgattggcctttcacccccagccacaagtcatccgctaatttttcaacattagtcggttcggtcctccagttagtgttacccaaccttcaacctgcccatggctagatcaccgggtttcgggtctataccctgcaacttaacgcccagttaagactcggtttcccttcggctcccctattcggttaaccttgctacagaatataagtcgctgacccattatacaaaaggtacgcagtcaccccataaaagaggctcccactgcttgtacgtacacggtttcaggttctttttcactcccctcgccggggttcttttcgcctttccctcacggtactggttcactatcggtcagtcaggagtatttagccttggaggatggtccccccatattcagacaggataccacgtgtcccgccctactcatcgagctcacagcatgtgcatttttgtgtacggggctgtcaccctgtatcgcgcgcctttccagacgcttccactaacacacacactgattcaggctctgggctgctccccgttcgctcgccgctactgggggaatctcggttgatttcttttcctcggggtacttagatgtttcagttcccccggttcgcctcattaacctatggattcagttaatgatagtgtgtcgaaacacactgggtttccccattcggaaatcgccggttataacggttcatatcaccttaccgacgcttatcgcagattagcacgtccttcatcgcctctgactgccagggcatccaccgtgtacgcttagtcgcttaacctcacaacccgaagatgtttctttcgattcatcatcgtgttgcgaaaatttgagagactcacgaacaactttcgttgttcagtgtttcaattttcagcttgatccagatttttaaagagcaaaacttcgcagtgaacctttgcaggtacactctgaagtattttttatttaatcactacagagatggtggagctatgcgggatcgaaccgcagacctcctgcgtgcaaagcaggcgctctcccagctgagctatagccccataacatgtagttaaaacctcttcaaatttgccgtgcaaatttggtaggcctgagtggacttgaaccaccgacctcacccttatcaggggtgcgctctaaccacctgagctacaagcctgtagaggttttactgctcattttcatcagacaatctgtgtgagcactgcaaagtacgcttctttaaggtaaggaggtgatccaaccgcaggttcccctacggttaccttgttacgacttcaccccagtcatgaatcacaaagtggtaagcgccctcccgaaggttaagctacctacttcttttgcaacccactcccatggtgtgacgggcggtgtgtacaaggcccgggaacgtattcaccgtggcattctgatccacgattactagcgattccgacttcatggagtcgagttgcagactccaatccggactacgacgcactttatgaggtccgcttgctctcgcgaggtcgcttctctttgtatgcgccattgtagcacgtgtgtagccctggtcgtaagggccatgatgacttgacgtcatccccaccttcctccagtttatcactggcagtctcctttgagttcccggccggaccgctggcaacaaaggataagggttgcgctcgttgcgggacttaacccaacatttcacaacacgagctgacgacagccatgcagcacctgtctcacagttcccgaaggcaccaatccatctctggaaagttctgtggatgtcaagaccaggtaaggttcttcgcgttgcatcgaattaaaccacatgctccaccgcttgtgcgggcccccgtcaattcatttgagttttaaccttgcggccgtactccccaggcggtcgacttaacgcgttagctccggaagccacgcctcaagggcacaacctccaagtcgacatcgtttacggcgtggactaccagggtatctaatcctgtttgctccccacgctttcgcacctgagcgtcagtcttcgtccagggggccgccttcgccaccggtattcctccagatctctacgcatttcaccgctacacctggaattctacccccctctacgagactcaagcttgccagtatcagatgcagttcccaggttgagcccggggatttcacatctgacttaacaaaccgcctgcgtgcgctttacgcccagtaattccgattaacgcttgcaccctccgtattaccgcggctgctggcacggagttagccggtgcttcttctgcgggtaacgtcaatgagcaaaggtattaactttactcccttcctccccgctgaaagtactttacaacccgaaggccttcttcatacacgcggcatggctgcatcaggcttgcgcccattgtgcaatattccccactgctgcctcccgtaggagtctggaccgtgtctcagttccagtgtggctggtcatcctctcagaccagctagggatcgtcgcctaggtgagccgttaccccacctactagctaatcccatctgggcacatccgatggcaagaggcccgaaggtccccctctttggtcttgcgacgttatgcggtattagctaccgtttccagtagttatccccctccatcaggcagtttcccagacattactcacccgtccgccactcgtcagcaaagaagcaagcttcttcctgttaccgttcgacttgcatgtgttaggcctgccgccagcgttcaatctgagccatgatcaaactcttcaatttaaaagtttgatgctcaaagaattaaacttcgtaatgaattacgtgttcactcttgagacttggtattcatttttcgtcttgcgacgttaagaatccgtatcttcgagtgcccacacagattgtctgataaattgttaaagagcagtgccgcttcgctttttctcagcggcgcggggtgtgcataatacgccttcccgctacagagtcaagcgtttctttgcttttctctgttgagattctcaggagaaccccgctgacccggcggcgtgtttgccgttgttccgtgtcagtggtggcacattatagggagttattccggcctgacaagcgaaaaatataaaaactttatcgttcgctcacttttcaggcaaaacatcttaaatatagtcttttccgtctaacttatagacaaaaacgagccccgaagggctcgttttatcatttactggacggcgacaatccggtcttcattaacttccaggcgaatcactttacccggaaccaattcaccagacagtatttgctgtgccagcgggttttcgatctgctgctgaattgcacgtttcagaggacgtgcaccatagaccggatcgtaaccgttctcgctcagcagtttcagcgcctcgtcagaaatgtggatttcataaccacgttcttccagacgtttgtacagacgtttcaactgaatctgcgcaatcgaggcaatgtgctgttcacccagcggatggaagaccaccacttcatcgatacggttaatgaattccggacggaagttatggcttaccacaccgagcaccagctctttcatgtgcgcataatccagttcaccgaagcgttcctgaatcagatcggaaccgaggttagaggtcataatgacgaccgtattacggaagtcgaccgttctcccttgcccgtcagtcagacgcccatcatccagtacctgcaacagaatgttgaagacatccggatgcgctttttccacttcatccagcagaatgacggaatacggacgacgacgcaccgcttcggtcaggtagccaccttcttcataaccgacatatcccggaggcgcaccaaccaaacgagacaccgagtgtttctccataaactcggacatatcgatacggaccatcgcctcgtcgctatcaaacataaagttcgccagcgccttacaaagctctgttttccccacaccagttgggccgaggaacaggaatgaaccaatcgggcgatttggatccgccagccccgcacggctacgacgaatagcgttagataccgcatcaaccgcttcgttctgaccaattacgcgatggtgcagttcttgctccatacgcagcagtttttcgcgctcgctttccatcatgcgagaaaccggaatccccgtccaacgcgccagcacttcagcaatttcggcgtcggtcactttattacgcaacagacgcatagttttgccttcgagctgcgttgcggcttccagttgcttttccagttccgggattttgccgtattgcagttcagacatccgcgccaggtcccccacacggcgagcctgttcaatagcgattttcgcctgttccagttccgctttaatggtctgcgtaccagaaagcgatgccttctctgctttccactcttcttctaactcggagtactgacgttctttgtcgctcagttcttcgttgagcatatccagacgttttttactggcttcatcagactctttcattaacgcctgttgttccagtttgagctggatgatacgacgatcgagtcggtcgagttcttctggttttgagtcaatctgcatacgaatgctggatgctgcttcatcgatcaggtcgatggctttatccggcagctgacggtcagcaatgtagcgatgagacaacgtcgccgctgcaacaattgccgggtcagtaatttgcacatggtggtgcaattcgtaacgttctttcaggccacgcagaatcgcaatggtatcttcaacagaaggctcggcaacaaacactttctggaaacgacgttccagcgcagcatctttttcaatgtactggcgatattcgtcaagcgtcgtggcacctacgcagtgcaattcaccacgcgccagcgccggtttcagcatgtttccggcgtccattgcgccatcggctttacccgcgccgaccatggtatgtaattcgtcgataaataggatgacgttgccttcctgtttggcaagatcgttaagcacgccttttaaacgttcttcaaactcaccgcgatatttcgccccagccaccagcgcgcccatatccagcgccagtacccggcggcctttcaacccttccggcacttcgccgttgataatacgctgcgccagaccttcaacgatggcagttttaccgacgccgggttcaccaatcagtaccgggttatttttagtacgacgttgcagcacctgaatggtacggcgaatttcttcatcacgaccaatcaccggatcgagtttgccctgttcggctcgttcggtaaggtcgatggtatattttttcaaagcctgacgttggtcttcagcaccttgatcgttcacgctttcacctccacgcatttgttcaatcgcttgagtaatgttggcggtggtcgcccctgctgctttcaggatgtcggccagcgtgccgcgagactcaagtgccgccagaacgaacagttctgacgagataaagttatcaccacgtttttgcgccagcttgtcgcaaagattaagaacgcgcaccagatcctgtgatggctggacatcaccaccagtaccttcaacctgcggtaaacgatttaatgcctgattgatatctgtgcgcaactggccagcatttatgccagcggatgttaataaaggactaaccgaacccccttcctgattcagcagggcgctcattaaatgaagtggttcgataaattggttgtcgtgcccaagtgcaagtgattgggcatcggcaagagcaagctggaatttattagtaagacgatccagacgcataactcctcccataacggatcaaagttgctactggagattaaatgaggtcatccctcaattattcaaggttattgaccagattaatgtgaaaagaaaatcacgcgtaccggatcgtcttgattctttaggttatatcagccaaatgaaacttgccatacgaccggtggtcttgtcgcgacgataagagaagaaagtctcattttccgtatatgtacaacggtcgccgccgaaaatttgctcaacacccacgttcgccagacgctgccgggcaagctgataaatatccgccagatacttatcaccatgctgaatgaaagctgcacttgctttagcgtctactgccataaacgcctcgcgaacctccccccccacttcgaacgcgcgtggaccaattgccggccctaaccaggcgagaatattttccggattatcagcaaaacaggaaaccgtctcttccagcacgcctgcgcacagtccacgccagccagcatgagcggcggcgacttccgttcccgctcgattgcaaaacagcacagggaggcagtcggcagtcatcactgcgcaaaccgtgccgggcgtattgctataagaggcatccgcccgttttgaggcataaggttcgccagtgagcttaagcacatctttgccgtgtacctgctcaagccagaccggtttagaaggcaaattgcccgcagcaaaaagtcgcttgcgattctcctcaacgtgatccgggttatcgccacaatgggcaccgaggttgagtgagtcatacgggggcaagctcacgccgccgatacgagtggagctacaggccgcaacaccttttggctgcggccactgcgggacaatcagcttactcataaccagtccacttcatccttatgttcttcgaaatcggcgcgcatcacctcaatcagctccaccatatcttgtggaataggcgcatgccattccatttcgatgccggagatcgggtgataaagacgcagcatggttgcatgtagcgcctggcggtcaaacttacgcagcgtggagataaatgcttccgaagcaccttttggcggacgcggacggccaccataaaccggatcgcccaccagcggatgagtgatatgggccatatgcacgcggatctggtgcgtacgtccagtttccagacgcaaccgcagacgcgtgtgcacacggaagtgttccatgatgcgatagtgagtcaccgctggtttgcccatcggatgcaccgccatatgggtacgtttggtcgggtggcgactgattggctcgtccaccgtgccacctgcggtcatatgaccaatcgccaccgcttcatactcacgagtaatttcacgccgttgcaaagattcgactaaacgcgtctgagccggaacggtttttgccacaaccatcaggccagtggtgtctttatccagacgatggacgatgcccgcacgcggtacatcggcaatgggtggatagtaatgaagcaacgcattcagtaccgtgccatccgggttacccgcgccaggatgtaccaccaggtcgcgcggtttattaatgataataatgtcttcatcttcatagacgatatccagcgggatatcctgcggttcaaaacgcgcttcttcttcaatctcagcgttgatggcaacctgctcgccacccaatactttttctttcggcttatcacaaactttgccgttaaccagcactcgctggtcgaggatccattcttttattcgcgaacgtgaataatccgggaacatttcggccaaagcctgatctaagcgttgaccgagttggttttcggacaccgttgcagtgagctgtactcgttgtgccatatatactgcttcttcgtttatcgttggggttttacggctttgccgtttaatatagtgtgctattgtagctggtcttaaccgggagcaggaacagagaatctcccgtattacattttgaggaaagtcaaaacgtcatgacgcgcatgaaatatctggtggcagccgccacactaagcctgtttttggcgggttgctcggggtcaaaggaagaagtacctgataatccgccaaatgaaatttacgcgactgcacaacaaaagctgcaggacggtaactggagacaggcaataacgcaactggaagcgttagataatcgctatccgtttggtccgtattcgcagcaggtgcagctggatctcatctacgcctactataaaaacgccgatttgccgttagcacaggctgccatcgatcgttttattcgccttaacccgacccatccgaatatcgattatgtcatgtacatgcgtggcctgaccaatatggcgctggatgacagtgcgctgcaagggttctttggcgtcgatcgtagcgatcgcgatcctcaacatgcacgagctgcgtttagtgacttttccaaactggtgcgcggctatccgaacagtcagtacaccaccgatgccaccaaacgtctggtattcctgaaagatcgtctggcgaaatatgaatactccgtggccgagtactatacagaacgtggcgcatgggttgccgtcgttaaccgcgtagaaggcatgttgcgcgactacccggatacccaggctacgcgtgatgcgctgccgctgatggaaaatgcataccgtcagatgcagatgaatgcgcaagctgaaaaagtagcgaaaatcatcgccgcaaacagcagcaatacataacagaaacctgaaacacaaaacggcagcccttaagctgccgtttttttattctgtcagttgtgaaactgaagcgatttagtcgctatcgatctcatcaaatatggctcgctttgagatattcctcaagtaaaaaaacatctcttcctgcgatttctcacaaaaaagattcgttgacaaaaagtgacaaaattatgagattttcatcacacattttgacatcaggaacggtatgctgaattcaccaagacgggaagacaagaggtaaaatttatgacaatgaacattaccagcaaacaaatggaaattactccggccatccgccaacatgtcgcagaccgtctcgccaaactggaaaaatggcaaacacatctgattaatccacatatcattctgtccaaagagccacaagggtttgttgctgacgccacaatcaatacacctaacggcgttctggttgccagtggtaaacatgaagatatgtacaccgcaattaacgaattgatcaacaagctggaacggcagctcaataaactgcagcacaaaggcgaagcacgtcgtgccgcaacatcggtgaaagacgccaacttcgtcgaagaagttgaagaagagtagtcctttatattgagtgtatcgccaacgcgccttcgggcgcgttttttgttgacagcgtgaaaacagtacgggtactgtactaaagtcacttaaggaaacaaacatgaaacacataccgtttttcttcgcattcttttttaccttcccctgaatgggaggcgtttcgtcgtgtgaaacagaatgcgaagacgaacaataaggcctcccaaatcggggggccttttttattgataacaaaaaggcaacactatgacatcggaaaacccgttactggcgctgcgagagaaaatcagcgcgctggatgaaaaattattagcgttactggcagaacggcgcgaactggccgtcgaggtgggaaaagccaaactgctctcgcatcgcccggtacgtgatattgatcgtgaacgcgatttgctggaaagattaattacgctcggtaaagcgcaccatctggacgcccattacattactcgcctgttccagctcatcattgaagattccgtattaactcagcaggctttgctccaacaacatctcaataaaattaatccgcactcagcacgcatcgcttttctcggccccaaaggttcttattcccatcttgcggcgcgccagtatgctgcccgtcactttgagcaattcattgaaagtggctgcgccaaatttgccgatatttttaatcaggtggaaaccggccaggccgactatgccgtcgtaccgattgaaaataccagctccggtgccataaacgacgtttacgatctgctgcaacataccagcttgtcgattgttggcgagatgacgttaactatcgaccattgtttgttggtctccggcactactgatttatccaccatcaatacggtctacagccatccgcagccattccagcaatgcagcaaattccttaatcgttatccgcactggaagattgaatataccgaaagtacgtctgcggcaatggaaaaggttgcacaggcaaaatcaccgcatgttgctgcgttgggaagcgaagctggcggcactttgtacggtttgcaggtactggagcgtattgaagcaaatcagcgacaaaacttcacccgatttgtggtgttggcgcgtaaagccattaacgtgtctgatcaggttccggcgaaaaccacgttgttaatggcgaccgggcaacaagccggtgcgctggttgaagcgttgctggtactgcgcaaccacaatctgattatgacccgtctggaatcacgcccgattcacggtaatccatgggaagagatgttctatctggatattcaggccaatcttgaatcagcggaaatgcaaaaagcattgaaagagttaggggaaatcacccgttcaatgaaggtattgggctgttacccaagtgagaacgtagtgcctgttgatccaacctgatgaaaaggtgccggatgatgtgaatcatccggcactggattattactggcgattgtcattcgcctgacgcaataacacgcggctttcactctgaaaacgctgtgcgtaatcgccgaaccagtgctccaccttgcggaaactgtcaataaacgcctgcttatcgccctgctccagcaactcaatcgcctcgccgaaacgcttatagtaacgtttgattaacgccagattacgctctgacgacataatgatgtcggcataaagctgcggatcctgagcaaacagtcgcccgaccatcgccagctcaaggcggtaaatcggcgaagagagcgccagaagttgctcaagctgaacattttcttctgccaggtgcagcccgtaagcaaaagtagcaaagtggcgcagtgcctgaataaacgccatattctgatcgtgctcgacggcgctaatacgatgcagccgagcgccccagacctgaatttgctccagaaaccattggtatgcttccggtttacgtccatcacaccagaccacaacttgctttgccaggctaccgctgtccggaccgaacatcgggtgtagccccagcaccggaccatcatgcgccaccagcatggcctgtaatggcccatttttcactgatgccagatcgaccagaatacaatctttcggtaaaggcggtaatttgccaataacttgctcagtaacgtggattggcacactaacaatcaccattccggcatcggcaacaatatcagccgctcgatcccagtcatgttgctccagaatccgcacctgataacccgagagggtcagcatcttctcgaacaggcgtcccatctgaccgccaccgccgacgataaccaccggacgcagtgacggacaaagtgttttaaatcctttgtcgttttcactggagtaagattcacgcatcacccgacgcaaaacatcctcaatcagatctggcggtacacccagagcttccgcctctgcacgacgcgaggccaacatagatgcctcgcgctccggaacataaataggcagtccaaagcggcttttcacctcgcccacttcagcaaccagttccagacgcttcgctaataaattcagcagcgctttatcgacttcatcaatttgatcgcgtaatgcggtcaattcagcaaccataataaacctcttaagccacgcgagccgtcagctgcccgttcagatcctgatgaatttcacgcagcaaggcatcggtcatttcccagctaatgcaggcatcggttacggatacaccgtatttcatttcactgcgcggttgctcggaagactgattgccctcgtggatattactttcgatcatcagaccaataattgagcgattgccatctttgatttgagcaaccacggattctgccaccgcaggctgacggcgataatctttattggaattaccgtggctgcaatctaccatcagagacgggcgcagtcccgcctgttccatctctttttcacattgcgcaacatccgcagggctatagttcggcgctttaccaccgcgcaggatcacatggccgtccggattcccctgagtttgtagcaacgcaacctgccctgcctggttaatgccaacaaaacggtgcggctgggcggcggcgcgcatagcgttaattgctgttgccagactgccgtcggtgccgtttttaaaaccaaccggcatggaaagcccggaggccatttcacggtgagtttgcgattccgttgtacgagcaccaattgctgaccagctaaacagatcgcccaggtattgcgggctattcggatctaacgcttccgtcgccagtggcagtcccatattcaccagctcaagcagcaatttacgcgcgatctgcagcccggcttctacatcaaaagagccatccatatggggatcgttaattaaccctttccagccgacagtggtacggggtttttcaaaatagacgcgcattaccagatagaggctatcgctgacctctgcggcaagggctttaaatcgacgagcatattccagagcagtttccggatcatgaatggaacaaggaccacatactaccagcagacgaggatcgcgcccggcgataatatctgaaatgcttttacgcgagtcagcaatctgggcttcttgttgcaggctcaatggaaaagcggccttcagttgttccggagtcattaaaacctgttcgtcggtaatatgtacgttattcagcgcgtctttttgcatgatggcgatcctgtttatgctcgtttgcgatagttgatcctcagcgaggatgacgtaacgataacacataaagtaaagttttcaatccatatttcgtacatttttatttacacaggcaatttagtcgcgctttcaacccttacctctgtatagataaatttacactccctttgaaaacaatccgctatgctttgaaaaaggagaaagaaatgatgaaaaagtttatcgcccccttgttggctttactggttagcggatgtcagattgatccttatactcacgcgccaaccttgaccagcaccgactggtatgatgtcggtatggaagatgcgatatcgggcagcgccataaaagatgacgatgcatttagcgattcacaggcggatcgcggtctataccttaaaggatatgccgaaggacaaaagaaaacttgccagaccgattttacttatgcccgaggactttccggtaaaagctttcctgccagctgcaacaatgttgaaaatgccagccaactgcatgaagtatggcaaaaaggggctgatgaaaatgccagcacaatacgattaaattaattaaaaccccacaaataaattaaacataagattttactcattgtgttttatttctcacattgatgacggtcgcatgaaaaaatgatattttaatgagcattctgaaaaaatatcgatgcatttcgagcgaagatggtggggatccctgaatgcgtttttctcaccgactgttcttacttctgattctcctgctgacgggagcaccaatactcgctcaggagccttctgacgttgcgaaaaacgtgcgtatgatggtttccggtattgtcagttacacccgctggcctgcgctatcagggccaccaaagttatgtatcttttcatcttcacgttttagtaccgccctacaagagaatgccgcgacatctttgccttatctgcctgtcatcattcacactcaacaagaggcgatgatttcaggctgcaatggtttttattttggcaacgagtcaccgacattccagatggaattaaccgaacaatatccgtcaaaggcgttattattaattgccgaacaaaataccgagtgcattattggtagcgccttttgtctgatcatccacaataatgacgtcagatttgccgtaaacctggatgccttatcgcgtagcggtgtaaaggtcaacccggatgtcttaatgctcgcacggaagaaaaatgatggataacgataattctcttaataagcgccccacgtttaaaagagcattacgcaacatcagtatgaccagcatatttatcactatgatgctgatctggttgctgctttccgtgacctcggtgctgaccctgaaacagtacgcgcaaaaaaacctggcactgacagcagcaacaatgacttacagtctggaagcagctgtcgtttttgccgatggccctgcagcaactgaaacactggcagcgctgggccagcaagggcaattttcaactgcagaagtacgtgataagcagcaaaatattctggcatcctggcattacacccgtaaggatccaggcgatactttcagtaatttcataagccactggctcttccctgcccccatcattcagccgattcgtcacaatggtgaaaccattggcgaagtacgcttaaccgctcgcgacagttcaatcagccattttatctggttttcgctcgccgtactgaccggttgtattctgctggcatcaggcatcgcaattaccctcacccgccatttgcacaatggcctggtagaagcgctgaaaaatatcaccgatgtcgtacatgatgtgcgttccaaccgcaatttttcccgacgagtttcggaagaacgtatcgctgagtttcaccgcttcgctctcgacttcaacagtctgctggatgaaatggaagagtggcagcttcgtttacaggctaaaaatgcgcagcttctacgtaccgcgctacatgacccattaaccgggctggctaaccgcgcagcgtttcgtagcggcatcaacacgttgatgaacaattccgatgcccgaaaaacgtcggcgttactatttcttgatggcgataatttcaaatacatcaatgatacctggggtcatgcgacgggcgatagagtcttgattgaaatcgcaaaacggttagctgaatttggcgggctgcgacataaagcataccgcctgggcggcgatgaattcgctatggtgctctatgatgtacagtcggaatctgaagtgcagcagatatgttcagcactgacacaaatctttaatctcccgtttgatcttcataatggctatcagaccaccatgacattaagcattggttacgcgatgaccattgagcacgcctctgcggaaaaattacaagagcttgccgatcacaatatgtatcaggccaaacaccagcgtgccgaaaagctggtgagataacaaggatatatcgatatgataaagcacctggtagcacccctggttttcacctcactaatactgactggctgccagtcccctcagggaaagtttactcctgagcaagtcgccgctatgcaatcttatggatttactgaatccgccggcgactggtcgctgggcttatcagatgccattctgttcgcaaaaaatgactacaaattgctcccggaaagccagcaacagatccaaaccatggcagctaaattggcctcgacagggctaacacatgcccgtatggatggacacaccgataactatggtgaagacagttacaacgaaggcttatcattgaaacgggcgaatgtcgtggccgatgcatgggctatgggtggacaaattccacgcagcaatctcaccacacagggtttaggaaaaaaatatcccatagccagtaacaagaccgcccagggccgcgccgagaaccgccgcgtcgcagtggtgattactaccccttaaaacaccagcaaacagataaaaaagggccagccaattggccagcccttcttaacaggatgtcgcttaagcgaaatcttagttaagacgctctttgatacgagcagccttaccagtacgctcacgcaggtagtacagtttagctttacgaacagcaccacgacgtttgacagaaatgctgtcaactaccggagagtgagtctggaagacacgctcaacgccttcgccgttggaaattttacgaacagtgaatgcagagtgcagaccgcggttacgaatagcgataaccacgccctcgaatgcctgcagacgttttttggaaccttcaacaacccatactttcacttccacggtatcacccggacggaaggaaggtacgtcctgcttcatctgctcttgttcaagttgcttaataatgttgctcataatttaatctcttatcctgggtaaactgatatctcgggggcttacgccatcccatcatgtttatgttgctgttgtgcgtgttccgttttgaactccgccagcaaccttgcttgctcttcagtcagagccaggttttccagaagttcaggtcttctaagccaggtacggcccagcgactgtttcaaacgccagcgacgtatctcggcatggttgcccgacagtaacactggcggaacttccatcccttctaacacctcaggccgcgtatagtgcgggcaatccagcaatccttcagcaaaggaatcttccgttgccgaggcttcatgtcccagtactcccggaataaaccgggaaacggagtcaatcagcgtcattgctggtaactcaccaccactgagaacgtaatcgccgattgaccattcttcgtcaatttcggtttggatcacgcgctcatctataccttcgtagcgaccgcacaccagaatcaatttttgattcgttgccagttcgctgacgcccgcttgatcaagcttgcgtccctgtggtgacagataaatcacctttgcgccttcacccgccgcggcttttgctgcatgaatggcgtcccgcaagggttgcaccatcattaacatccccggtccgccgccgtaaggacgatcgtccacggtacggtgccggtcatgcgtgaagtcgcgaggactccagctctggatgctcagcaggccatttttaactgcccggccagttaccccgtaatcggtaattgcgcggaacatttcaggaaacaggctaattatgccaatccacatagcgccgtcttttaccgtttatccggtggtttaaaaaccaggatcccaatctacttcgattgaacgagtagtgagatcgactttcttgataacctgcccatcgaggaacggtacgagacgttccttgataccaaacgcatctttcaggtttgccttaatgacgagaacgtcattagatccggtttccatcatatcgacgactttaccgagatcgtagccttcagtggttactacctggcagcccatcaggtctttccagtagtagtccccctcttcaagctgaggcagctgcgatgaatccacgacaatttcacaattcgtcagcaggttcgccgcatcacgatcgtcaacgcctttcagcttgatgatcatgtcctgattgtggtgcttccagctttccagctggacttgctgccactgacccgccttctggataaaccagggctgatagtcaaaaatgctttcggcgtcttcggtggaagaaaacactctgagccacccacgaataccgtaagacgaacccatttttcccaaaacgatgggatcaacaggtgcttgcgcggtgagttgtttgctcatcatgaccaccgtgacagattaagctgctttgtttacttctttgatcagcgcagcaacgcgatcagaaatagttgcgccctggccaacccagtgagcgatgcgatccagatccaggcgagtgccttcttctttttcgctagcgattgggttgaagaaaccaacgcgctcgatgaagcgaccgttgcgtgcattacggctgtcagcgacaacaacctggtagaacggacgctttttagcgccgtgacgtgctaaacgaatagttaccataacatcctcttgtgtgaataaaacaaccggaccccatcgaggaacggagtccggtgtcatattaaaagcccgaaaattttactcatttttgcgggaattgcaatcaacagttgctaactctgctgtaaaaggccgtcggcggtgcagccagtttggtgccggagtgcgcgcagtcaccggagcgtacacgcagtacgtgaggatgacgagcacatcccggtgccaaaatggcaaacaagccaggccgattagcgaccagggaagcctgggggcatcatacccttcatgcttctcatcatcttcgccattccgcccttcttcattttcttcatcatgcgctgcatgtcgtcgaactgtttcagaagacggttaacgtcctgcacctgcataccgcaaccggcagcaatacggcgtttacgcgaacctttgatgatttctggcttagcgcgctctttcatcgtcatcgagttgatgatggcttccatacgcaccagcactttatcgtccatctgtgacttgacgttatccgggatctgccccatgcccggcagcttgcccatcagactagccatgccgcccatatttttcatctggcgcagctgctcaagaaagtcgttgagatcgaagccgtcaccttttttcagcttgctggctaatttctctgcctgcgcgcggtcaactttgctttcgatatcttcgatcagcgacagtacgtcgcccatgccgagaatacgcgacgcgatgcggtccggatggaacggctccagcgcctcagttttctcgccaacaccgaggaacttgatcggtttgccagtgatgtgacgaatagagagcgccgcaccgccgcgggcatcgccgtccactttggtcaacactacgccggtaagcggtaacgcttcattgaatgcttttgccgtattggccgcatcctgaccggtcatggcgtcaaccacaaacagggtttcaaccgggttaatcgacgcatggacttgtttgatctcgtccatcatcgcttcgtcaacgtgcagacgaccagcggtatccaccagcagcacgtcgtagaatttcagtttggcttctttcagcgccgcgttaacgatatctaccggcttctgaccaacatcagaagggaagaaatcaacgcccacctgctctgccagcgtctcaagctgtttgattgccgccgggcgataaacgtcggcagaaaccaccagcactttcttcttgtgcttctcgcgcaggaacttaccgagtttaccaacgctggttgttttaccggcaccttgcaggcccgccatcagtacgaccgcaggcggttgcgcagccaggttcagggtctggttctcttcgcccatcgccgcaaccagttcgttacggactattttgacgaactcctgccccggcgtcaggctcttattaacttcatgaccaaccgctttctcttttacgcgattgataaactcacgcactaccggcagagctacgtccgcctccagcagcgccatgcgcacttcgcgcagcgtatcttttacgttgtcttcagtgaggcgtccacggccactgatattgcgcagcgtgcgcgacaaacgatcggttaaattatcaaacattgtctctcgcctggggtggaaacggttggccgcaatcgcgacacatcatcagtattttgccgcagtataacatgaaggcgtctttgttgttatgcaacggttggagcagcgttcacctgacgctatactgcttctctttcttattgctcaaactgtcgacatcactatgcccgtttttgctctgctcgcgcttgtcgcctactccgtcagtcttgcgctgattgttcccggtctgctgcaaaaaaacggcggctggcggcgcatggctattatttctgcggtcattgcgctggtctgccacgcaatcgctctggaagcccgcatcctgcccgacggtgatagcggacaaaacctcagcctgctgaacgttggttcattggtcagtttgatgatctgtacggtaatgaccattgtggcttctcgcaatcgtggctggctgctgctacccattgtctatgcctttgcgcttatcaacctggcgctggcaaccttcatgcccaatgaatacatcacccatctggaagctacgcctgggatgctggtgcacattggcttatcgctcttttcctatgccacgctaattatcgccgccctgtacgcgctgcaactggcgtggattgattaccaactgaagaacaagaagctggcgtttaaccaggaaatgccgccattgatgagtatcgagcgtaaaatgttccacatcacgcagattggcgtggtgctgctaacgctcacgctttgcactggcctgttctacatgcacaacttatttagcatggaaaatatcgacaaggctgtgctctctatcgtggcgtggtttgtctatattgtgctgctgtggggacattatcatgaaggatggcgtggacgccgcgtcgtctggtttaacgttgcgggcgcggtaattctgacactggcctacttcggcagccgaattgtccagcagttaatcagctaaacccagaaaaggagtttcccctggaacacatttctactactacgttgatcattattctgatcatcatggtggtcatttcagcctatttttccgggtccgaaaccggaatgatgaccctcaaccgctatcgtctgcgacatatggcgaaacagggtaatcgctcggccaaacgcgtcgaaaaattgctgcgtaagccagaccgcctgataagcctggtgttaatcggcaataacctggtcaatattcttgcctctgcgctcggcactattgttgggatgcgtttgtacggcgatgcgggcgtggcaattgcgactggtgtgctgacttttgtcgtactggtatttgctgaggtattgccgaaaaccattgccgcgctgtacccggaaaaagtcgcttatccgagtagttttctgctggctccgctgcaaattttgatgatgccgctggtctggttgctgaatgctatcacccgtatgctgatgcgcatgatgggtatcaaaaccgatatcgtggttagcggctctttgagcaaagaagagttgcgcactatcgtgcacgaatcacgctcacaaatttcccgtcgcaatcaggatatgctgctgtcggtgctcgatctggaaaaaatgaccgttgatgacatcatggtgccgcgcagtgaaattatcggtattgatatcaacgatgactggaaatcgattctgcgccaactctcccactcacctcacgggcgcatcgtgctctaccgtgattcgctggacgacgccatcagtatgctgcgagtacgtgaagcctggcggttgatgtcggagaaaaaagagttcaccaaagaaaccatgctgcgcgccgcggacgagatctattttgtgccggaaggtacgccgctcagcacgcagttggtaaagtttcagcgcaacaaaaagaaagtcggcctggtcgtcaacgagtatggagacattcaggggctggtgacggttgaagatattctggaagagattgtcggcgatttcactacgtcgatgtcgccaacacttgccgaagaggtcacgccgcaaaacgacggttcggtgattatcgatggcaccgccaacgtgcgggaaatcaacaaagcctttaactggcatctaccggaagatgatgcccgcacggttaatggcgtcattcttgaggcactggaagagatccctgtcgcaggcacccgcgtgcgtattggcgagtacgatatcgatattctcgacgtacaggacaatatgattaagcaggtaaaagtttttcctgtgaaaccgctgcgcgagagtgtggcggagtaacgaaaacggcccggcattcgcatgcagggccgtgaattattacgaaagcagaaattaagcttttgctttcgctacagtaaccatcgccgcacgaatcgtacgaccattcagcgtataacccttctgcataatgcccagtacgttacctggcgcaacgtcatcagattccaccattgcgatggcctgatgcacattcgggtccagtgggacgttagtttcggcgatcacttcaacgccaaacttacgcacaacatccagcatcgacttcagcgtcagctcaatgccttcaaccatcgcagacatatccgggttagctttatcagccacttccagcgcacgatccaggctatcaatcaccggcagcaattcgttgatgaatttctccagcgcgaatttgtgggctttttcaatatccagttcagtacgacgacgcaggttttccatttcggcttttacacgcaaaatgccgtcacgttcacgggtctgggcttcagccagctgagcttcgagattcgcaattttttcatcgcgcggatccacctgctcagcagaagcttctggctcaactgcctcaatctcttcgtgctgatccatgataatttcttccggggcttgcccctcaggcgttttctgttctttactactcatgaatttctccgcgtttttttcgcattcatctcgctaacttcgcttattatggggatcagtttcagggtttcaagggaagcactcacattgtcatcaatcttcgcaacaaggacctcggaaaaatgaataatcatttcaagtgtattggcattgtgggacacccacggcaccccactgcactgacaacacatgaaatgctctaccgctggctgtgcacaaaaggttacgaggtcatcgttgagcaacaaatcgctcacgaactgcaactgaagaatgtgaaaactggcacgctcgcggagattgggcaactagctgatctcgcggtagtcgttggtggcgacggtaatatgctgggcgcggcacgcacactcgcccgttacgatattaaagttattggaatcaaccgtggcaacctgggtttcctgactgaccttgaccccgataacgcccagcaacagttagccgatgtgctggaaggccactacatcagcgagaaacgttttttgctggaagcgcaagtctgtcagcaagattgccagaaacgcatcagcaccgcgataaatgaagtggtgcttcatccaggcaaagtggcgcatatgattgagttcgaagtgtatatcgacgagatctttgcgttttctcagcgatctgatggactaattatttcgacgccaacaggctccaccgcctattccctctctgcaggcggtcctattctgaccccctctctggatgcgattaccctggtgcccatgttcccgcatacgttgtcagcacgaccactggtcataaacagcagcagcacgatccgtctgcgtttttcgcatcgccgtaacgacctggaaatcagttgcgacagccagatagcactgccgattcaggaaggtgaagatgtcctgattcgtcgctgtgattaccatctgaatctgattcatccgaaagattacagttatttcaacacattaagcaccaagctcggctggtcaaaaaaattattctaattttacgccagcctctttactgtatataaaaccagtttatactgtacacaataacagtaatggtttttcatacaggaaaacgactatgttggcacaactgaccatcagcaactttgctatcgttcgtgagcttgagattgattttcatagcggcatgaccgtaataactggcgagaccggcgcgggtaaatctattgcaatagatgccctcggtctttgtctcggtggtcgcgctgaagccgacatggtgcgtaccggcgctgctcgcgctgacctgtgcgcccgtttttctctgaaagatacgccagcggctctgcgctggctggaagaaaaccagcttgaagacgggcatgaatgtttgcttcgtcgcgtgatcagcagcgatggtcgctcccgtggtttcatcaacggtacagctgttcctctgtcacaactgcgcgaactgggtcagttgctgattcagatccatggtcagcacgctcatcaattactcaccaaacctgagcaccaaaaattcctgcttgatggctatgccaatgaaacctctctactgcaggaaatgaccgcacgttatcagttgtggcatcaaagctgccgtgacctcgcgcatcatcaacagttaagtcaggaacgcgccgcccgtgcggaactgctgcaataccaattaaaagaacttaacgaatttaatccgcagcccggagagtttgaacaaatcgacgaagagtacaaacgtctggcgaacagcggtcaattgctgaccaccagccagaatgcattggcattaatggccgacggtgaagacgcaaacctgcaaagtcagctttacacggctaaacaactggtgagcgaattgattggcatggacagcaaactgtccggcgtacttgatatgctggaagaagctaccatccagattgctgaagccagcgatgaactgcgccactactgcgatcgtctggatctcgatcccaaccgactatttgaacttgaacagcgcatctcaaaacagatttcgctggcacgtaaacatcacgtcagccctgaggcattgccacagtattaccagtcgctactggaagaacagcagcaactggacgatcaggccgactcacaagaaacgcttgcgctggcggtaacgaaacatcatcagcaggcactggaaatcgcgcgcgcattacaccaacaacgccagcaatatgcagaagaacttgcacagctgatcaccgacagtatgcatgcgctctcaatgccgcatgggcagtttacgatcgatgttaaatttgacgagcatcacctgggcgctgacggtgccgatcgtattgagtttcgggtaaccaccaacccaggtcagccaatgcagcctattgccaaagtcgcatccggtggtgaattgtcccgcatcgcactggcaatccaggtcatcacggcgcgtaaaatggaaaccccggcactgatttttgatgaagtggatgtagggattagcggtccaacagcggcagttgtcggcaaactgctgcgtcaactcggcgaatcaactcaggtgatgtgtgttacccacctgccacaagtcgcgggatgtggtcatcaacactattttgtcagcaaagaaaccgatggtgcgatgacagaaacgcatatgcaatccctgaataaaaaagcgcggttacaagagctggcgcgcctgcttggtggcagtgaagtcacacgtaatacactggcgaatgcgaaagaactgcttgcagcgtaaacttttttcctgcttcacggtcagagtaaacagcaaaacgccgtaagaccggaaagcaaaaggttttaaagtgatgaaaggtctattatcatcggcatattacagatgagccacgtactgctcgggcccgaaaaggaatcaaatcactatgcgctgtaaaacgctgactgctgcagcagcagtactattgatgttgaccgcaggctgttccactctggagcgagtggtttaccgtcctgacatcaaccaggggaactatctgaccgctaacgacgtatccaaaatacgtgttggcatgacgcaacaacaagttgcgtacgcattgggtacaccgctgatgtccgatccatttggtacgaatacctggttctatgtcttccgccagcaaccaggtcatgaaggtgtaactcagcaaacgctgacgctgacctttaacagtagcggtgtgttgaccaatattgataacaaacctgcgctgagtggtaactaataataaagtggctctcaaagacgttaaaaaaggtgctcaatgagcaccttttttctgtctgttatttattcgctgatttttctgctcgttgcctgcgaagctctttcggatcggcaatgagagggcgataaatctccacccgatcgccatcatgcacactatcgcttagttttgccggacggctgtaaatgccgactttgtttttagttaaatcgatatcggtacgcaattccagcaagccactggcgcgaatagcttcttcaaccgtcgcgccctcctgcagcgtcactcgctgcaggtactgcttctcaggtagcgcataagccacctcaacggcaattttacctggcactgtaaacctctttcgcacgaaccgtaaaagcctggaccatattagccgccagctctttaaacacgcgaccaaaggcgagttcaatcaacttattggtaaactcaaagtcgagatgaaactcgatacgacacgcctcctggctcagcggcgtaaacttccatccaccaatcaatttcttgaacggcccatccaccagattcataagaatactttggttactggtcaactggttgcgggtagtaaacgttttgctgatcccagccttagagacatctaccgccgcagtcatctgcccaggagtggactccagaatccgacttccggtacaacccggcaaaaactgaggataagactgaacgtcattcactaactgatacatttgctccgcgctgtagggtaccagtgcggtccggctaatctgaggcataacaatttccatcaacaaaaatccaacaaataatatcatttatcctgctgtaaaaaaaacgctatcccggcgctgggtaacatcgggttcatgctaagatagagccttgtcccccgcaggattgatatggggtgttttcgatttcagattaccgatgattcacgacgcttatgacgaagaaaaaagcacataaacctggttcagcgaccatcgcgcttaacaagcgcgcccgtcacgaatactttatcgaagaagagttcgaagcgggacttgccctgcaaggctgggaagttaaatccctgcgcgcaggaaaagccaatatcagcgacagctacgtccttctgcgtgacggagaggcatttctgtttggcgctaacatcacgccaatggccgtggcctccacgcatgtggtgtgcgatcctacccgtacccgcaagttacttctcaaccagcgcgaactggactcattgtacggtcgcgtcaatcgagaaggctataccgtagtggcgctctccctgtactggaaaaatgcctggtgcaaagtgaaaatcggcgtcgccaaaggtaagaaacagcacgataaacgttcagatatcaaagagcgcgaatggcaggtggataaagcacgtatcatgaaaaacgcccaccgttaaacctgcactccaattattgaccagttcctcaccgcgcctccctctccggcggcgcgaatgaacatcttattggctatcacatccgacacaaatgttgccatcccattgcttaatcgaataaaaatcaggctacatgggtgctaaatctttaacgataacgccattgaggctggtcatggcgctcataaatctggtatacttacctttacacattggggctgattctggattcgacgggatttgcgaaacccaaggtgcatgccgaggggcggttggcctcgtaaaaagccgcaaaaaatagtcgcaaacgacgaaaactacgctttagcagcttaataacctgcttagagccctctctccctagcctccgctcttaggacggggatcaagagaggtcaaacccaaaagagatcgcgtggaagccctgcctggggttgaagcgttaaaacttaatcaggctagtttgttagtggcgtgtccgtccgcagctggcaagcgaatgtaaagactgactaagcatgtagtaccgaggatgtaggaatttcggacgcgggttcaactcccgccagctccaccacttttgataggactgcaaccggacagcggcaataaaaacagccacttacggacactgaccagacagcaggcagaccgagaaaagacaaaaatatgcacgtgaaatgcacgtgcactttaaaagaaccccagatttcacggtctggggtttttctatttgtaactaagggtaacaaaaaaccctccccctttcgcgtctcgctcgccttgacactgtttatttttacagtaaaaatactgtatacaaacacagtggttttccggaggcttttatgttcgttgaactggtttatgacaaacgcaatgtagaggggctcgaaggggccagagaaattattctggccgagctgacgaagcgggtgcaccagattttccctgacgccgaagtgaaggtgaagccgatgcaagcgaacggcttgaatagcgatgccagcaaaagtgatcgtgaaaagctgaaccgcatgctggaggaaatgtttgatgaatccgacatgtggcttgtgtctgagtttccgacagttcgccaggtgggtatgtgacaaaatctggcagccatcaattatctggctgccaacatttaattacgaaccagattcattctccgcagcttccaaagcttcttcctgtcgttgattccatacactgttttcaggcatgtcgagtcgcacatcgatccagctattggcaggaacatctataggagcccctttcgttttaacaatttctccttcttcgctaagtatgtatttgcgcttaaaaagccgaatcgtcagcccaccgctttctgtttgctcagcttcaactacacccagttctcccattccacctgggtccattggcggcagcagctgccagccttctgatgccaggcctgccgaaccagtcagcaaatagatacctacatctagccgggaaattttgattccctctgcctcagcattagccgtaccgcatccgcaccagataaaatcattttcatcaatatctgtgcgctgattctcgttctgagatttcacgattctggccaccggcgaagctgctttcagcgtgccatcggaggctttagtggtattttcagaagtgtaaacaactgagcctggcttcacagacagcattgttgagaatgcatcggtgccattatttcttcctgcaatctggtaagagacggtaccaccaatccctgcgacacctgccctgaaacgaggagttccgttaaccatcaccgtatgagcccatacactaccaacagttgaaagtccttcaacggtgaaagcgtaagggttaccagcgataccggcgatattcagggcattcgttaacgttcctccgccagtaccaagagcaccaagtgctgttagcgcttcattagctgttttcgctcccgtaccgccctgagcgatgctgagagcagttgttaatccgctcaggctggtaatgtcgctgtttgcccctttcttcgccagcgatttctgagccggtaccgtgacggccacgccgttaatcgtgatagtgacatctgtagtaccgttcatcacatcagcgaagccactcatgtaacgctggtacatcgtgaacgtttcagcaatatcctgtgccaggccgtcaacgctcaggctgtcgctcagaagaatggcgtatttggttccagctgggatagcagggcttgccgctggcgtaacggtgagactggttgcgctaacgatggcggtaatctgaaaaacctgcgctggactggtcattgcaataactgtgcagccgttgcggatcagagaacctgcggcggtaaaattagtacctgtgccggtgatattgttaccactaatagcaatggtgcctgttgtgtaaatcatgaactacctcacgataataacgatcgttaaaagcgatcaatcatgtaaaattgatcgctcatatcaatctgactattttttaaaattaaataaaatggaagttcccgcataaacaggaatgttgaaatgaaacttttattcgctgcagcgtttttgcttgtggctggatgtacgaacaaacacacagataacgcattccagatggattacccggttgatgcctctcgtttatcgctcggtggtgatattcacgtaaatatcgactgtgccaccaaagaggtggaagttatttcagacagtagcaacggaatattcagccgccatataaaaaaaaggttaagtaatatttgctacaataaaccggataagctggatgtcgtttatcgctttaattcagcaaagggcgtgaaacaagatatgattgcaactcattacccacgagttcctcccgtgtcaaatcccaacaaactgagagatggggattcttagcccacgcccctgaaacgtctggccccagttgcgctgattatttgaaatatatctgccctgcaactgtgatcccgtccacttcagcactatccccgaataaccgaccacctccccgtcatcgctgagatttccggggcagttgttgaccagaatccacggattaaagctgaggctcaccgatagtgtgttgttttggaggtcatagttcgctggcacatcaaagaaaccgacaactcggggcatttttgatgcagaaacagcactccagatgagatttccggcactgtcgaagacatccagatacccgctttgaattccaatgttacgcgcagtgcggatcatgctccccgcgttatcttcaagcaggtccgcaccaggcatcccgtatctgtttgcgccaagctgcagccaccttaatctcccgtcattccagaatgcctgcggagtgaatcccagggtgctgccattcccaaatgggctgtctacctggtaaaaacctttgttgttcactgcgccgagcgtacgttggtcataaaaaagggtggacctgttttgcgagtccaccagtaattttccatcgctgttgtaaacttcgaatccgctcattgaaagttatacacctccacattgagtgtgatcgcaggactgccggttgagggcaaatagtaagctgtaaaaccgccattataggcgcggcagtggtattcgttgacagtgacgccagtcgacacaattgagatgaatgagccatcctgggttatcccgacgaaggaaacgtttttcgacgtttcccccgcagcgaatgttactgaggtgcttccgatataccggatggcataatcactcaaatcaaccgctatgcgccctgcactgtcccagcattgcaacccctgtggcattaccataaccccattctgacacgcagtacgttattgctgtcatagatacgaatgagagtgctggttatcagcatcctcccgcccccggccacgccgttaatttcgaacgttccactcttatcaagcttccagcctgcagaaccagccacatagttattcgactggatatagttgccgattttggcattgctgatggtcccgtcaccgatgaccgtatccctgataatggtttggccattctggataacgaacgggagcgtaacattaccgcctgcctgggtcatgacagcaaaacggtcagccaggaacagaacctgtgactgcatgccctctggcgtattctgaacaccaatgcccattccggctgcgtactggttgccattagaatcaacagctaccttgatgctgtacattgcattcaggttgttattgatgtcggctgatacctggctgttctggacaatatctgcagactggccgttaaccgtgaccttaagcgagttaatttgcgtcgcagacgcctgggtgaagtcagcaagtgtcttcgacaagtcagtgacattcgctatgtttccaccggcactggaatctagggtacgcaacgactcagcgacagccttactggcttcggccatgacattgtcgactcgctcaataccggctttattatcaccatactgaacgctcagaaggttgcgctggttaacctgtgcgagcgtgctggttatcagcgcgatggcattgttttgaataccaccgttggccttatccgttcttgctgccaactcctccaggcgggacgccactgacgaagtcgtgtctgtgacaacctgccgcagcgtggtgatatcagcagtgttttgtgagctggcttgttcagctgcgtctgccttacctgatgcagcatcagctttactcgaagccgaatcagctttatcagaaatgacctgagtactcgcagtgagctgatcaacagcagttgcccttgcctgagcttcatctgacagagcctgccttacctcggtaattcccgcttcgttctgcgctgtttttgcctcaagacggataacatccgttacgcgtgcctccgtctcagtagcgataacctcccggagctgttcgaaagtcgcagagttagcgccctgttgggctgtctggcgcacgacaacatcggcaatagccagcgcgttgccgatgattgcttctgctgtctgcttattcgaacctacggcggcagccagcccatcggcgttctccttaattgcttcagaaaactcggccagtttctcgctactgtctacagcactttcaatcagatccttaaatacctcggaatctttaatctcctccaggatcgcatcggtgatatcggatacatcgatgctggcctgaccgcgcacaaagtctgtataccctgattcgttgccgctgcggtccaccagctgcgcgcgataccagaaaatctgcccagccttaaggcccatctgctgatatttgcgctgcgggtaaggcacatcggccagcagtatcgcatcgtcttcggtaccggtcaggctgtactgaatttccgtcttcagcgtgtcgtcggtattcgccgggaatccccagttcagctcgataccaaatacaacgttttcagaagcgatgaagccaaccggcttcggtgggctgcccactttacccgtcagcgttttctcttctgaagagccccatccggaagaaatttctgcggcattgattgcgcgcacgcgcaccaggtagcgccctgcataaatcccctggacgtcgaatgatgtggtggagctgcgcggcacgttaacccagttcccgtcgttgcggcgccattgcgcttcataggcgatagcgttctgcgcctggtcccagctcacgcgcatggtctcaacgctgatattttgctgcaccacggaaaacgagctgatcacgatgttcgaaggcggcgactggttacccggcgggattacactcaccggccgctggtcgatgatggctccggtatcgatgcgggcatatttatccgggtcgtgccatgcgccagtaatcgagaaagtgccatcatccttttcggaaacgctgacaacacgatactgctgcgcatagagctcgtcagattcaaccacccaaacagcttcggcctgtggcgtctcactgtatgccgtggtgactgtgactgattccccgtttacggcctgaatggtcctgctctgcgacactccggatggtaagttgagaataaggcgatcacctgctgctgcatctgccacgcggtcaagtttgataacgcgaccgttaacggcgctgatgcggccgcccataacctttccggaaagcagctcgtctgccacggcgatgatgtagcccggctgcggaatgttgccgtccagcccgacatcaaacgaaacaacacgatccttgttgttggtgagaataccccagcgtccctttcggttagcttctgactgcctggtgcagccgatggctgtcatttccagctgattgaagccgtaccgcgccaccagcgcctgctcaaataccggctccatcgcgtcggcataagcgttccccggatctgaccatgaaaccagtgctgtggtgtagcggcttttcgtggtgctgctcgaataggtgaagcgaccgccaacaacgttagcgcgcgtgtagctgtaatcaacatcgcgcggcatgtcagccagggccacaatctgatccccgccccagtaggtcatgccacggaagatagcggcaaaatcacgcaggactgtgtaggcgtcgttccggtcctgaatgtacacgttgcaggtataacgtggttcggtaccgttgccccctttgccgtctggtaccatctgatcacaatactgggcaacctgataaagcgtccatttatcaatattcgcagcggtcaaacggtgcccgaggccgaaccggtcagaaacaaccagatcgtaaaaaatccacgcagggttatccgtccatgcccacttaaacgcaccggtccatgtaccgctataagtgcgggtttcagggtcgtaggtatctggaacgcggataacgcggccgcggggctcgcaggagatctgagggatagagccgttaaactggctggaatcgaattcgatgtagagtaacgctgtgtttggatatcgtaacttggcgtcaatcacctcagtgaagctctgcagcgtcatcgtgtcgccgatcttcgcgctgttggcatcagaggtaatcttaggcagacgtattgtccaggtgctgccagcctgcggtaaatcaatgcggtggctgcgctcataaccagacgtcgttttgccggtcacgctggtattgagtaccgtctgccatgtgccgccgtccgtctgcaggtcaatcgcataattgaccgagtaacccaccagatcaccgtcgtcctcctgtttgaaaagcgagggccatttcagacgcaggcgaactgctgaaagctgcgtattggtaaaggtgcgcgtccatgctgtagcgcttgatacctcagttcctacgctgatttcgttttcggtaccgggaataccctgaatatatttttgggcctgcgttcccgcgcgaaactcccacgttacgccgctgaagttttgggagccgtcagcattctccagggctgttccgtccaaatagatatctttgccggttagctgccctgcaaactccccttcgccaagcgcaacgaggatttttgccttcgctacagattgcagatcatcaggctgttcggtaggggttcgtgaactggagctgccgcccttgcggccctttaacactttatctgtagccatattgcgcccataaaaaaagccacccgaaggtggccagaaaaaaggttagttatctactgctgatcttcgacataaattccggcagaaataatcgctccgcctatccgccggcggccatataggagcggaactggatagccttgcgccgcggtgtttgttacaccaccgaatgcgtaggatgcgcggttatctgcgctttgtttgcttgccagacctgcaggttgaggagatagcatttggacaacgcctcccagcatcatggctgcaccgaatttcgcagccccgtaccccaccgctgatagagtgccgcctgagaaatagccaatggctaccccaacaacgacgagcacggcgccaagaattgtctgtaataccccggcttttttacttccgattaccaccgggacaattcgaataacttcaccggttaccggaaaaccaaaatcatcctttccgatattttttttatctttaaaaacggcgtaagtcaggccccttgctttgctggtgatcaggaatttctccagcccgtttatagtttttgtaagagagttgatcgcctcagcggttgtgcgtattaatcgatggtgaacctttccataggttttacccaaaacaccgccaagctcaattcgggtcatgacctctgacattttctttctccataaaaaaagccacccgaaggtggcttagcttatttttaacttttcaaaggcatgatctggcagccgtagcccagtgatcgttccatccttttgcgacggcgtaaactttaacatcgcttccgcctgcttctgatttatcgatattcaccactgaaagggcgccgaaaatatcgtctgatgctgttattttgtaacctgactcagttggtatgctggagcttgaagatcgaagctccacccatttaggggccaggcatctgttaacctgatctgcactctttgaagtgtgttcagaaagaataggcttttgggattcgagggagtttacagagcagccagccaaaccaataactagcaccaagaatagctttttcattttcatgctcctttgaaatttcgtaaaggttagcatagagatctgtgacgtagaatcttcatcgtcctttcctgccagtagccaccatacggcacgcgctggctcagatgtccatacaggtggtgcagcagcatatttccctccagcagaattcccgcgtgattccacttatcggcctggacctgcatgatcaccatatcgccgggtttcggtggtccgtcgaattcacggaatccgcactcataccagcaatcctgatagaagttgtccggatagtcgttttcccaccagggataatcgacgcggtaatcatggagttcgatgccatgcgtttgccggaaatagctcattaccagcccccagcagtcgaagtgtccaagcacaaacggacgctccagtagcggcagttctccgcgcggctggatggtgcgtaaatcaccctccggccagctcacaatatgccagggtaaaagcgttgcgtcgtattgcgctttatccagttcgctaggttgcgttgtggcgtcagggtgactgtgaacgatggcgatcaccgttccccagtcctcagcagctgcgtagtcttctgggcaaaggacaaaattgtcctccggcgccgcggcaagattccggcacgggaaataacgttcaacgcggcttttctgcgccaccacgccgcaacactcatgaggaaattcagctgcagcatgcgccataatcgcatcgatggttttctgacgcatatcaactcctgatcaaagacgtgcccgggaagccaccaaatgagagttcgttattttcgccgaatcggagtttgcaggccgtcagcgtgccgttgcattcatccagcgacggatcgcttaccgggttgttgtttttgtcgaaatagcgggtgccggcatagtcgcagccgtcgcctgtacgatatttattccggatgcaccaggtacacagggaatgaagctgtcgcgtcgggatcatttgcccctgcaggtccatcgggctggacagagcaaattcaacggtttcaccggcaagctcgcccgttttcccgtcgatataccacacctgcagcttttcctgagtcgggtctgctgtggggttgccgtctgcgaaatttctggcatcgagatatttctcttttgtgtcgtgaatagtgactttcgcctgcagcagatcgtcatacgcaagacacagggcagaaatggagctttcgatgttcgcaaccgtcagtgatggcgttgcattgctcccactggttgatttctccagaccttccagttgatatggccaggcggcatattcatttccctgccaccagattggtttcgccggaagcttggactcatccccaccagcggcgatgatttccgcttctgtgtggggaatgctgtaattgtgaaagcggagaacgtccgttagcccaaaggaagaaccgtccacctcaatcaggcgaacatcgtttccggattccagcttctgataatctgcgtttaagctcatggtttaaatgcctggatgaatgttgcttcaaggttgaatttccccgcgcccagcccggtgggtttatacgtttcgcaacgatataaacccaaaggctcgagcggcggcttccactgaaaggctttcgttccttcatgcctgtcgagaaaagacttaatggcagaaatgtaggtttcgttgccagtgaagttaagcgtccactgctgagttctagtgttcaatccatcccctgaaacctgctcatatccatcgccaaactgggctttcctgacgcggaaacttgtatcagcctccgcgttaatccgtgggcaccaggtgaaagtttcaatggccataattatcgggttcctttcattgcgttccagatgtcgccgccgggacgaatgtcacgcatcacattctgcttataacgtcgatcaacaaattccccgacctcggcaccaaattgctcaaggcctggagaggcctgagtttgagtgttgccgttgccatcgatggtgatataaacctgtggcgccgaagatacagactgaccgccgccacctccgaccgcacgaacgccgagagaaccatccggcgcgcgggtaagcggcatgatcgcctcaggcccagcctcgcccatgattccggcaccgccttttgcgaaagcgaacatggtggggtttctgacgatcccattactgaaagcgctcagagagggggagtcataaacgccgcctttggcgttaaactggaagttcgatccgtaactggaaaccgccgtaccggtgctggctgatgctcccgcaccgcccccgaagaagctgcctacactgccgatgagagagccaaagatgccagaaccggaagaggccccacccatcgcgctaaccaccgccatctgcagagccactttttcgataatctgcaggacagaaataccccacgatttccagctaaccttattgccttctagcattgaggtgacgttaccaaacgcgctgtcgagtgtggttttcaccccatcagaaaccgtgccggatacgttactgatttcatcaaaccagtttgcatagccgcgtgatactccggacatccaatccgcttcagctgctgcaatagccttgtatttcttatccagagcatcgagggctgcggcgcgctgcgcgatggcctcggtcccgccgtccgttttagcaaaaacacggtcgatctgttgcgtctcgtcgaaccggctgcgctggcgatcgctcatgcctgcagtttcggttgtcagcgtcgcctcatccctgaactttctggccgcttcagttaaatccttcagggcatcagcttgttcgcgctgcttgcgcacgttctcgtcggctttttgcgtccattttgccagctctgctgatgatgcctggatcgccctgcgctgctcgtcggtccatttagtgcctgcctggtgcgatgcagcgtaaagctccgaggctttttcgccttccgtggcccgaacgcgttgcacgtcaatagccacgctcagatcggccattttccgggaatactgttcggcggtgctggccgcttcgcgctcggctttactctgcgcatttgaggcagcagtggaggttttttttgcttctgcagctgctgcatcctttttggctgcctgatccttgttgtagatgtactgtgtataaagcgcccccgtcagcttcaggtcttctgcttcgtagacgtgctgctgatggagtttctctaatccgcttaagctggccagctcattatcgcgacgcgagcgctccagtgcagtttgctgttgaggcgttgcgttcgccagagagacaactggcccggcatactgcggcggcttcgcgccagcggtcgcagacattgagcggttaagcaggtcatacgcacctttcaagatagagactgcgccagcctgttcgatagccttttgcgtggccagatcgctggcattgtttaccagtttctgcgtttgctcgacttttgaggctgcctgttcgcgctggtactccagctggttcagcttatcggtcagctcgatgtttttggccatgatgtcggcctggcccatgaaagtgttaatcagggtcagcgtcggatggcggttgtagtcctgctggatttggtcaaccgccttaaggctgtctttcaccttcgcgatctgagagtcgaggtcggccaggtcctgtttttgcgcctgtaaagatgtacgggcatcggccgcggtcgaacgcaggccaagcaccgacatctgctggagcttggtgttgatctcgtcgaggttgttggcaaaacctaccgcctcacggtgcacctgctgggtatgctgatacaggccatacatcgcagcgccggcaccgataatcactccaggccagcccccgagaataccaagaacgccactacccaggcgggacatcactgaggctgtattggtgaggttattaacggccgaagtcctgccagcaagcgccgtattcagtgatgcctgagcagcagcaagattacgctcagcgacaatctgagcctcaatactcgtcgccgctgcacgcgcctgttgagcgcggtaaacagcctggcgaccagcagcaacgctaacctgagctccacggacctgagcctgcgccagcgcgacctcggcggccgtattagcgagaactgcccgggttgactgagcaacgctgccgaccatgttgccaaaataacgagcgaggccaacaccaaccagaataccggctgtatttgccacatcatcgatgttattcgccaggccatccagcacgccggaaagcgttgatgatgcgccgaccgcatcgttcgccccgccaacccatgcaaggaaggcgttttgcactttctgtgcagatccgctgatggatgcaggaagggtgtcgaattctttacgcaggatctcgacattggtcagcagcgggacgatcttgtttgtcgtcagttcgccgttgttggccatatttcgcaggccaccaacagtggtacccagcccatcagccagcagtttcgccaggcggccgccgttctccatgatggagttaaattcttcgcctcgcaaaacgcctgagccaagcgcctggctaagctgggtgataacagagctcgcctcttcggtactggcgccagacagcttcagtgaggttgctacggtttccgtaacttttgcgacgtcagcagaagcgtaaccggcatcacgcagggactgtgcaattctgctgtacagattgctgtttgcctcgagggatgttccggtgcgctggctaatttccatcagcacgcgctgggattgcacgtaatcctcactggaagaggacgcaaggcgaagacgcccattcaactggttccacgtgtcggcaaactgaatcagctgatgtgtggcaaatgcaccagcccaagcaccggcaagcccggcagcagaagatcgcacggttgcaagctgagaattcaggtcagccaaagaccgctgagtttcacgcgtggccgctgcagcttttttcccgccctgttccatagtgcggtagtaatcggttcccatacgggacgctctggcgatctctgactggaaagaagaagagttcgccgaaattttgatgattagctcgcgcagcgttgccatatttcacccataaaaaagcccgcagccgcgggcatcaaagactggacatccattcttcaagttcagagacttcagcgccttcttcctgctcaccccatttcagcatcacgtcaggaatggtgaatttcccgccctgagagttcagcattgcaacggagatctgcgccgcctgagcatcggcgcgccagtcaccaatcggactgatgcggtcgaactcgatccacattttgagctcgctggcggtcatggtctggcgcagttcgtggagagtacgccccaaccggagcgccagcgacatcaggaagaaggtcagcggctgctttacggctttcccgcttcttcctggctcatgccgagattgagggcctgagccagcaggcgggagtgcacaggaccataaattttagatacctgctcctgatcctcatcgctgaatactcgctcgccgttttcatccagcagaacgtcaataaacagaaccacatcagcctctttgttacgcagaaacttttccgcctccgtcagcgtcggtgcctcttcgccctcggcgagctggggattaacgatctcccggaatttcacccaggcatcgccagagggttcacgcagcgttacctttgcgccatcccattcagggaccgtgataccttctttggtgcgataggctttcgatgctgtaagcgccacgttgcgtaatgaattctgtgatgttttttgcggcatttcatttttctcttgttacatgatcgaagggataaaaaaagcggccgaagccgctcaggaaccagacgcgtagatgcgtttaggtttgccgcgtacacgcagagaataggtagcgccaacaacggaagaggttgcagcagaccatgagctctggcgtacctccaccagcacgtagaaaccgttaccagacgggaataccacgcgcagcgcgcgcagttcgtcattttcgtaagcggtctgcagtgcctcctgtgctgcttcatcgccaacccagttacgggtaatgctcatttcagcaggcgcggcgaggccgttggtttgctcctgttcagttgagcacagcgtggttacgtcgatatcccctttttgaccgcctgtgaaggtgatctcctttgttgcacaggccgcttccagccaggtaacaccagcccccgggaaacctgaggcgttaaaatcctcggcggttacgggtgcgtcggagacggcaaaggtcatcccctttgtgacttcatacttactggtcatggtttctccagttaaaaaaaaggccgccggagcggtctgttatggtgggtaaagttaaacggttacctgaaattcgagcgttgcccggtgatagcgcagatcaggctcatagcccggcgttttcacaatgttttccggcttcagcacctgcagtgcatcaagcgccatattcctgatcgtgcgcgcttcagtgatggtgctggaataaacatcaacctgcacagaaacggctgattctgcctgaccgcagagaacgtcagcggccacgtcggtaataatcgagaaaattacccagggcggcgagactgaaggctttccgtcactgccgagcggcgcaacgtagggataaacctgccctccggccagcggcgccagcagaggatagagatcgtcttccgtcatttgctcaatgcctcgtcaatggcctggttcatgcgcctgatcgcaacctccgtcgcctgctcctggcgaacatcgaacgcgggacgaatgaaagggtgtggtggcatgttaacggttcccatttcaacgaatcgccagtaaaaggcgtttctcgggttattcgccttcatcgtgttatcgctattgccggtgcgcgggttaacgccacgaatatggacgccggaagaaatttccccgcggcgtcggcttttttgggtcaccaccaccacgttttttttcagtttcccggtgcgcactggtgcgcgtgcgatcacctcttccttaagcacttcggcaccggcgcgcgtagcatcacgcagaaccttgttgttttcagcacggctaagcgcctccagatcctttgcgatgtcattcaatccggaaaaatctaggctcgtcccaatcatttttcagctcccgttttgcaaaggatttccaggcgagtgccggtcgcatttgctacaggaggaccgatgatatttagcacctgacctttatacgggccgctgagcacttccagacgagaagaggcgttcagctcagccctgaagcgcatccagacgcgaatggttgcctgcgcagtttccgcgccgcctgacatctgctctctgccgctgatcccctttacctcagccgggaccgggttgccacctgtccacgattcaaccggctgaccagatggatcgcgcgaagtcgtgaaggtgagaatttttacccggtgcctgaaacgtccaggttccatcaggagccctcctcaggttcagatttaccgcgccagttgcgatggatgaacatcatccgttctgcggcggcgttctcataaagctgtacttcgctctgcgcggtcctgtgctcgaacatgtccgcaaacaccagcagtacggcgcccttcactgctgcaggaatgtcagttgccgctttccatgtcggttcatcacaccaccggtagcagtagtcaaaggctgcctgtgcgtacagcgtgatcagctcgtccctgtcatcctcctcaaactcaatctgctgtttgaaaagggggaggctaattacatccaaaacatctatcgccatacgttaaaagggcgggttaccccgccctcctccatcatgagccagaagagaaagtgcccttgatgattgccgtcgggcgatagtgcgccagcgcaaggcgttcttcacacaggatggtcagcatgtttttcacgaagttgtcgcgatcttcgcggctgacttctacggtggcatccatgcgatcccacacctgtgaggccatatcaaaaccgcccaccgtaaaggtgccggcggcttgcgccttagtcggaaccactggcaggccccacatgatgttgctggtaaacgcctgaggaccaccgaagatatagcggccttcgttgtctttcagcagcgcaatgttgtgccagtcgcgcgggttcaggacgataccggaagcgctaaactcagactctgtcacctggtaaatagcgtgagcgatgatgtcagcacgggtgtcaccagtggcattcagcgaggtgtcgtaggcggttgccactttgttcagaccttccaggttatccccggtaccgtcgccgttcagcagttggccctcttccttcagcgccaggccatacatcagacggccgttgacgtatgactgcagcattggcgcatcgtccatcacctgacgtgatgcctgcacccagtgcgcgatagtcttcacgttcgcggtctgcttgctgaatgtgatatccgattctggcttaagcgctttctcagccaccacatcggcgttattggtaaacacctcttcacgcacatattccagagcgttactggaaatgcggccctgagccagcaggtcacggatggtcagacggcgcaggcccggcatgataattcccgggatctgcataggctggatcagtgcgccagcagagtcagcgtcactgccgagcgacttattgaacgtcttcgcgtcgaaggtgccctgtttaccgtcccatgacttaatgagctcttcagcagctcgttcagagaaggatttcttctcacccggattttcagcgccggatgccagtttctgttcaagatcgaagaggcgggtaccggatttggtcagttcttcctgtaccttcaccaggtcggcctgcagctgtttggataccttacccgtgctttcgatttctgctttctgtgcatcgaaaagctgggacattttctgctgggattcttcaatagctttttgaatgagagcgagttcagacataattaattacctaaattagaagggaaagatttaatgctctgaagcagagcgttgatttgtgcttcgtttccgtcgccctcggactcgctccgaatcgctgacttaaaccgggctattagcccaactgcctgtgatttggtgagcccgactgaatccctcagccagttctccacatcacgaattgtttcaatgccgtcgacactcttcatggctgcgatgccagcctgttcgttggcggggaaggtgcagacgctgatttcacgcagagcctggatattcttaaaaatgcggcctgttggaatgatggtgtaatcgtctttcgcaacggaaaagccaaccgacataccttcaaccgtaccgtgctgcattgccgctttcaggtcggcggcgccgctgtgccctggggtaagttgaccgcgcacatacaggcctttttcgtcttcggccaggctgtcccatttaccaaccggcagctcccacgtcttgtggttgaaaaacatcgccactttgcgggtctggttcgccagtgcgtatttaaacgccccgggcagaatgatgtcgccatcggaatcggtgttattaaaaacagaggcgtagccttcaaaaatcccctgtttaccgtcaccggtgaattttatttctgtctcgtcgaaggacagcgtttttacgatctcaggcattacggcccccataaaaattaagccccgttattacggggctctttgttggttcctaaatcggtgatcggcacgtattgcgactggcgcatagccacatcgccacccggcaatggcgggaggttgtccgttcgtcgcatctcgttgatggtgcgtagccctgcctctcccattgccttcataaaggctgcgcgggatgccgaatcgcccctcagcaggccgtcgagattgtgctcagcatgaatgcggccaacatccttagcgggaataagccaccgctgaatgctgttttcccaccgggagatatagggctgcagggtgtactgcaggaagccgagattctgctgctcaatgcccgatccccagctcgttgatttctcgacgtcgccgacaaggtgaggcggtacgccaaagaatcgcgccagttcacttacctgaaattttcgggacgccatcatttcggcatcctgcggcgttacgccaattgccgatgtggaaaagcccgcttccagaatccagaggcgttttttaaccggaccgccggcgatctctttgaagttctcttcgacctgcgagcgctgctgttcagtcagcactttttcgccggttgagaggatttgcggagacttggcgccgttggcaaagaaatctcgctgctggtcctccatcgcaactgccacacctgccgatttacaggcaaaagcaattggtgacaggccgaccagcccggtgaatccgaaacctttaaggtgaaaaatctctctctgcgaaaagtcggcgtattcgctgtcgcgttgatagcgataaaccacttttttcccgacgagtttcacatccatattggcagactgaagcgggagaaggctgatcacgtcacccgcgctgttgcggtccaccagtgcatacgcgttaccgtagaaacagagctgcatcgtcatggcctccctgaactcctgggcggtcatgtactgattcggtgagtagcgcagcagtcgcgccagcggattgctcaaacccacttttttgcggttgtcattctggtcggtttcgaagacatcaagcggtaagcatgccgtgagcgttgaaatcaggctcacgcagcgccaaaccgtcgaaatttgcagtatccgttcatcgttaatggatgaatcgcccaggtgtccataggccgaaacaggccccgtctgtgagccctgatttggggtgactaaacgcccgccgacaaaccaggactgcagccttgcccaccagccgttattggttcgcaggtcaatcgtgtatttaggttcttccatcacatgctcagcggtcggaaaatgaagtcgtcgaagtcaccaccctgttcggtaacttccccattagcagcaccaacggacattgtcattgcgaccatgccatcaatacggcccgttgctttggatttatccagcttacggttgccagcagcatcttttacgatcaccgcgttccaggcacacatggttaacaccgggtgcatgccatgcctcacccgcccgttaagcatcagtgactcaagggtgtctacagccgggcccatatccttaaagccctggccgaactcgaccagaggaaggctcaggccgatgtcgtcagcctctttcctgaactggtcaatgcgccatcggtcgaaggccatcgaagtgaggtcaaaatcaccgatgatttcggcgatgtcggcgaccacgaatgagtaatcgacggacgcaccgggcgtggtacgcaaaagcccctcccttgcccatacgtcatagggcgcgcggtctgttttggaccgtgcttccaatgtcttttgtggggtccagaagaagggaaagatatcccagacaccatcatcagcctcaccagcgataaccagcgccgttaagtcgttcctggccgacagatccagcccggcataccatttcctcggtgtgttaaccggtactccaccgcacaactcccacacgctgcgggagataaacggcgatacggtcgacactctctgattaaggttgagatttcggaaggtgttctcaaagcttggcattcggcctgccatttcagcctggcgcgccatgtctttttcagatctgaacgttcccagcgccgggttcgcagcaagccaggattctcgcttactgatatcagcgtcttttggcgcttcgtaaacgtggcagacaatgtgcgggtctttcgatttgaccgcatcatcaatccagatgctcaacaggtcggcatcgttcgccgcctgggtgctgataacgataagaagcggattctcatgcgcaccctgggctgtagtaatcgcgtcgataaaatcatcctgcggcccccttacctgtccggtttcgtccagaatcgccagaatcggggaaaggccgtgtgtggttttaccctcagcagatagcgccttgtattcgacattacacggcaaccctattagctttttgccactgggaattatatgcactaacacctgcaggtccgggttcaggttcaccatcttcaccgcgaggttgaaaacgatggatgcctgctcgcgactaagcgcgccgcttacgatctgggtattctgtaccgcctctggccccaccagatgcgccagcaggataccggctatcagccctgtctttccgtttttgcgcgcgatgctcagtatcgctttatcggttccgactggattgtcgtaaaccgccaggatgaattctttctggaagggatcaagcctcataggcttacccagaagcttgccttccggcacgatgcaatagcgctcaatgaacgctattacacgctcacctcgcgtcatagtcttttatccgtgcttgggaaaggcgatcaggttgtcgtcctggccctgatgctcgtttttcgtgtttcgtgcatcacgatcattctgattgcgtttcttctggtcgcggctttcaccgttggttgcgtgggaatggatctgcaggtcacggcgctgagccaggatagttcgctgcaaatcaggaatttgtttgcggaggtttttaatcagcgcctcatttctcgcttcaccgcgcgcgcgttcttctttacgcaaatctctgcgtaaaacggtgagatagagctggttatttgccagttctacagcggccagaaggtcggctggcgtccagctgtccagagctttcgatctgatattgtcatgccagaatggttcggcttttttttccaaacctgcatgggacggaggatcgatggtgtccactgctgcatttttcatggcctgaaccgctgccgccgaactgtcggaacgggttcgtttatctgccatatgtcaacaccttaaaactaaaaaaatcgggttagcgttaaaatcaaactttggcggcggtcatttggggcaaaggttttgaagatttgatccccccccctgccctgatgcgattcattctcatttgatatcattgcatttgaaatgatttcacatgacatgtaatcgacttgccaccgccgcgctatgccgaatgtttgtctacctgttcgagtttccgatcgcctttcccgtgcccggagacaacatgccatgagacggtcactgtcggcacctcctgccctacagcgtgcgagaactgaatggatgtcacgtccttcatctccacgccatcaatcaccaggcgaacgaattttccatcgcggtattcaatgctgaggtctttcattacgtgctccagtgagacgcaggatcaagcgggtagccattggcatcacagcctattacagcgccgctcttctccattctctgtttcgttgagtcgtgatgtgctttgcacagtggctgccagttctctttactccagaacaggagctgtgctttcgatatagccagcgggttacctgacttaagcgcatctttgagtttgtggggttcgatatggtcaaccaccgttgctggggttatgcgcccctgctgctcgcacatcacacatagtgggtgctgctgcaggaaacgcagacgggccttatcccatcggctgccatatacgcggggctctttgttcatgccagtctccatgcgcgccggcgttccgtcctcggctcgttgtcagggtgacgctcaaccgtcgggaggtcagcgtgatccaccagcgagtaacacggataaatcacccggccaccgaatgcctcaccgacggcgtaatcagctgccagcgttttattccatgcgttaagcatgcgcgccagcctgccctgaggagggctgtaacatacgccgtgaatcagtttgcttaatacgatgtggtcaccacagacgcgatccgcatccaccagcattccggcaatttctttctgatactgcggcggtcggccggtaccgagataaaagctcagcatgtcgtcagggaagcgcaccagccattcagttaccttatcggtgaagccctgtacaggaagcgcgtcgtcttccaacaccactacccggcatgtttgctctgctgcccactcaagcgcacgccgatgattccagttcgcgccgcggttaccgtcatcaataagcagatgagcatccagcagcgcggtaagtcgttgcgcatgacctatgcgagagtgatggccaaccacaacaaacttcacttgtgtttccaccatgcggcctccttaccgataccatcagttttgaaaacggtatgtaccagggggccggtgaccagcctgtcagcgaatgactgcgcgacaataccgaacgccagcatgtcacccaccgcggcgccagcctgttctttcttccagaaacgataactctctatccggtagtaaagacggatgatgccgtgagcaaacgccatgacatcagcgcgggtaccgcccagcagaccagcgttaagcatcacatcgccgcggtgcgcttcaatgaattcttgatagatacgctcaggatgattctgctttgcccaggtgtcggcgtatgtcttcggttcagaaccgacgtaaacattcccgggctgcatttcttcccacggcgcgcgaagcatttcgacatcggtaccatctgtacaccacacgaaccggtattcagggtgatcgcgtaggtgctgccagatatgcagccagcgccggaagtagacattcatcttcacgtcaggaacgcggtaaagctcaacgtctgccggtgccgtctgtagttcatccaccagcgcgatgcggccacaatgtcgaagcgaggccgcccacccgctcaacatgtcaggtgaggctaccattctcgtaccgcgctgggggtcgggctggctggtcagtagcgtagtgataaccacgtcgcgctgctggcggtattcaacgtaaccagtaaacccggcgtcacgacgttcgttgtggatcttcacgttacgttccaccagcgcctgtcggtcgggacgcggtaccgaacgctcaacggcttcatgctcatcgagagagtggatcagcttttctgaaccgaagacatcagcgtaagcccacgtcgtgaggccagcgttatgaatccgcatggcgaggtcgctgtgttcgtacatgccgcgaccgtaaaccgtatcgaaaccgccaaccttctcgacagcgctacggtggtaatacagcatcacgccgcgctgcccggtgtaagcgatgtgcttatcatcccggtacaggactgccatatccttcagcttattcgtccctgccagatcgaggaactggtaagccaggtgcggttcgggtgattcgacgtatggcaggtgccagttatcaacgatgggccaggcgtcatcgtcccaaaggaatagatgctcacatccggcgtccatcagcgcggttaaactggcgttcttagaagcaacaatgccgagtgatgtttcatggcgaagcagctgcacgccatcaggcactactgcggcaggtttagagccatcgtcgataaccaccaccagcgcaccgatgggaagatgtttggtgtgctgctcaatggcacgctttaaaacgtctggccggttatgggtagttatggcaatgccaatccgtgacgctgaagcgcaagcgggtacaaacgggacaccatcaatagtgacctgcatagattctccacactaataaaaagatcattacttacctgtgacccttttgagtcgtcatacagaatcagtttcaatgaaaatagatataatcaaattggataagaaaattatttttattacattgattcatatgtggaattttcaatgattgctcttagtttgttactgatttttaggttatcgtctaaagacatgtctcagtgtcgaactgaataacgtgtgtcaaaaacaaattaaaatccaaacagcgcactcattggagagcttatgactagtgtaagaatccttggcggttttatctctgacgcagcaaaagatggcatctacataggtggaaaaggggtaaaagttgagattgagaatacggagattcgtaacaccggtcgctctggtgtccatgtttccgaaaatgatactgaatttttatatcctaaaggtttgaatccagagactcccaaagagttgctcatcaaagctcaagaggagctaaaggtaaacgaagcaacaggaagggcagacgaagctaccattttttccaaaataggattgtccgattggatagaaaaaggtgcaaacttaactgtcatcgcagattttttaatgaatacttttaagtagtcattaattagctactacgcagtgcctaaaactcaacctctattttaaagtccccacaagttgataatttgtggggacaaccattatcaagcccactagcaggtgagctttgtaatggctaacagtcggcatctggacgcgctacagcacgacaggcccacatgcaggcttcctgcattttggtgcgcgcaatggcgagacagcgcagcgcctctgaacgatcgctagcctcatcagagttggcctccactacctgcaaagatagatgtgtgcgttcaaggtccaactgctcgcaaaaatcacggctaatttccttcaggccattcatttgagcaatatcgtctgcggagagggttcgatatccttttactgtacttccgtcctgtggtttagcttcactcatggagttctcttctcggttggtttctggcagttcgcctgccacgctttgttatgcgccaggatgtctttcttcgtctggcggtccagaacatcccagtcgtgatccgttccgtatatgggtttaacccagtcgcaagccgtgtccactacttcaacctttacgggtccagttgtcccgcagctcgcgatcaacatcgtcgccagacatatggttaacagtttgctgtacattgctggcctctttcgttgtctctacccggcgatctgctgctgcgaccgttgcaacagcgttatcttcggtgcgctgctgatctgcttttgcttctgctttgcttgagccgcgaatatggcccaggccgaaagcgccagcgatggcggcaatgactgctgcagcaataccaattaaagtttcaaaccccatagtgacctcacaccagcacagatttcgccaggttaaacagcgcgcggcgtttatccagaccgttacggccgccattgataagcagcgtgacgcgctccacatcacctgaatggagcaggcatccgtgagagacgtagaaccatgcggcggagcgcgcagcgtattcatctcgttccagtagttcgggataagaaaccagatccagtttgagcgcctggccgcagctgtgatagttgctaagcccggtgatttgcttaaggcctcgcccgcgatatttccagccatcgccagcaacctggttgcccaggttctttttgccccactcaccgccataaaccagattggctatcgctttctgatttgctggttgcgttgccgttctgccgagcgcggcggcctgctgtgcagtaatgcgatgcttgccgaacgtaggtaccaggttttctgccgcatagttcaggttttccaccagccgggtgaaaccgccggactcatggcccatctgcgcgataaacatgacctgatcgagcggcgcggttatgccgaattccttcattgcagcatcgatatagtgaaaccagcgcacggctagactggcgcttatacctgccgccttttgaaattgtgtttggtccattagtgcctcagatgatcaaccaggcgcgccacgttgcctttaacggccaccagcacggaaagaaagatgatattggccccgatggaggaccaggaagaatgaggataaatcccgcacaggtacgcaagcggtaccgcgctgtaagtgacggtaatcagccatgccaaccgggaaacccacgggcgatggcgggagtcaccccggcgataaaacatcagagtaaccaccactccggcacagatcagagcgtttaatgttgcagttgggtcatttagtaccacctgaacctccccggcgcgttatcagcgccaccagcgagccaacatcctggttattcaggaacgtcaggattttgacggctaatgcagaaatgattacggcaccgatggcgtccagaggtttatcactgtaaccggtccaggcagataactttgagcctaccaacccggagcataagatcccggcgatatacgacactatgaaatatgccagccggcgggttgcactcagatcagctgctgtggcgatgtagaatacggcacctgcaaatgcgccaaataccacaccataatcggtgcctgtaagcaggccatagatactggcacccgtcagagcgccaccggctaagccagtgccggaaatcggatcggacatcggtccccctcaatgctgtgaatcctctcaatatgaggggaaagaaggccgctaggcggcgttattgtcactctgtcaaaggccatcgtaatgaccttttgcacagtgttatttactggatttaatcagaggccagagcagcgcaatcactccagccaccagcacaccatcagcaaggatggacatcattttgctggtgaagtcgatggcaaccaccaggaacaacaaaaccccggcggccgcccagcgcagttttccgatcacaggtactgatccagtggaagctgcagcgcctgagcgattttcttcagctgtttctcttcttcttcaccgatcccgtcgttgtcagcaacatcgagacacaggcacagaacgtcaacagcatcatttgtaccggcaacgtcagccagctcgcgcagcgcctgagcattagcggagcgcggcgaggcttcgtagcgcgcgcgaatgttgctgctcatctgcgcaatttctccggcgaatggtgcgaaggcaggcagtgccgaaatggttttttccagcgtggcgatttctttcgcatcgcaggtaccatcggcatacgcaatggagtaagcgccccatacagtcgcctcaaccgcatcgcggttttccattttcttaacttcagtaacggctttacgagctttctttttgaagataccgaacatagtgactttccttttagcgggtgagccagcgctcaggaatgatcagcccacagagacagtcacaccgaccgttccctatggctcacccctgaaaggctctgtggttggattgcgccgagcgtggcgcgaagaattacaggcataaaaaaacccgcgctgaggcgggtttgatgtcgtgtaggcgtaatatcccacgatggaaagcatacaggacagttttatgcaaagtcaacactaacgtgcaaaaaagtgtcgctatttgctccgatcatataaataagttgtcgccttctcaaattccactgctgcgtgaagctccccctggcgcagagtgtccaccagcatttcatagaagggtttccagttgcgtgaccatgaggactgatggaggtcagggagacgcttcagaatggcgcggtgtaccgtagccgaggagatagcagagaagccattaccagagcaacgttcacacgttttgaaaaccggtgcgccgcggtctttggtcgctttgcggtccaacacttcgcctttaccgccacacctgcaccgggcaaggatcactttctttcctccgcatgttccgcaaaccctattcaccagctcatttttaatcttcggggccacaacttcggcaccgtcggcgtcgaaaataccaggatgtttaaccacatcctcattcccggagataaacccggtaccgctgcaactgtgacatgtcacgctggtagccgccgaacgggagtaatcagcaaaggcaaattgtgccagcatctgcatacaccatccgaactgcccaccagctgctttgcgcacattcttcggtgcgacatccatcgcatatcgcgccagcgcctgaactgcgagctgttcatccgttttgctgattcccgctttaccgaagaacgccgccaggccgaagcgcgcacggctgctagtggtgccaattgccgccattacatctgttcctgtaaggcggtccggagaggttcctttcacgtcgtcgctgatgtgcattccttgtggactaaaatgtttgagcgatgattccagtttcatgcggccacctgctgttttttatagaaaaccagctcacgaacctgatcgccgttcatgagcatattgttgaaatcatcgtgatccggccagtacacgctcacgcgctgcaggtcatttttagccatcagatttgcgtgagcgcattcgcaggcagcagctaaacccgtagcgcttgtctcgtcgcggtcggcaaaaataatcagatgcttaacgcctgccgggacccggaatttcttcataaaattggcggtcatagtcgcccaggtattcactttgtaaatctgatgtgcagacagcgcagtttcgataccttcagcgatgccaagtgtgctggcgaccgggaacatacggatagcgaccgaacgagcgtgatcaagatagttatcttcctgcagcgatttctgccgcttggcgctggccccgatgtcagctttctttgcaccatccaataacgtctgatggaggtaacacagctcccctttatcgtctgttgccagtgaataaatagactggtatacccgtccgttatgccgttgcttggggttgagtcgcacggcctcagccggaagctgataaataccgcgtgaattcaggtattcagcgccggatgtaccgcgcagaggagacatttttgcaaagttgttgagtacctttctccgcagcttggaggcgtcgctagtctcgggaactttgtcacgtctgaacgtattgccgatcagtgcatcgatttcgcggcaaacctcgttgaatggtttgccctgggtttcggtaaccagcttaagcccgtcaccgctgccacaggtgcagatccatgttcccgcgccgtcgcggttatcgatgcggaactttccaatcgaatcacacagcgggcacttccccttaaagtgatttttaccggtgatcggcggcagtccgtaatgctcaaaaatcatggcccaatggccttttgctgcttctaccgttttcatgctcgttttcctaactgctgtctgatatcactgacgcgattaagcgcctgctgaattctttcctgggtaggcagctcttctacctgtgcctgctggcgctgctctttttcgattcgtctagcgaagctgatccgcttgtgcgtaatgaagtttgaaactgttggcgtgatgtccatcgggtaatcgctcagtccgttcggccattcgccaaaacgttcgcggaaggtgtgagcacaccaggcatcgctgacaggctttttccccagcgatacgcgctggcgctgatagaatttgatctgactccaccaggcttgtttctctgccttcgtcggctggcgctgctcgcccccaagttttttgagttttcgcccggtgtcggtatcaatgtcctcaccggcaagcggcttgtggccacatttagggcagacatagacgccagcaggcttcatgaagtggcattgcgagcattcgtgaggcagcttttctgctcgttcctcagctgcgcggcgcgcgccctcctccatcccgtctgatttacccggaagatcgtcatattcgatagagtccggataacctaggcggtgcacggttccgctgtgatcgaagatgaggcaggactctttacccggagcggtgcgcaagccacgcccgagcgcctgcagccagcgaatttcgctcttagttggcctggcgtagatgatgcagcgaacatcgctgtcgaaaccggcaaccagcacccctacactgacgatgatttttgtggcgccagtttcgaagcggtgaatgatggtttggcgttcttccgcaggcgtatctgcagtcataacctctgcatttacgccagcttggttaaactgaatagtcagaaaattagcgtggtctacgttgacgcagaacgcgattgtcggcaggtcccggccgttctccagccagttttggacgatatcgcccaccagcgttgaaccgcacatgatctccgccagctgcgcctcgttgtagtcggtaccgtactgcagggacggagaggttttaacccctttcagatccggctttgtgggcgcgtaaaattcgtatttgctcaggtcgccgcgctggatcagctcgccgatggtggttggcttaatcagtcgatcatagtattttcccaggaacggggaaaacggtgtccccgacaggccgatcactttcacgcctttttcgcgcaggcgttcgatatcctgcaggatgcgttttttccgcaggtgagcttcgtcgataatcagcagatcgatattgtcaggaaacacgcgacgaataagcgtatcggcgctggcaatttgtattttgagggaaggatcatagtttgggtgatccgcccatacatagccgatttcatcacccggcaacccatactccacaaaacggtttgctgtttgggttatgaggatctggtaaggcgcgcaaaacattacacgcatgccacgactaacgaacccagcaacgatgaaggcggccagtcctgttttaccgctgcccgtcggcgagtacaccatgaaggtttctgtatccttccagttacggcgcagctggttaagtgctcgttcctgtgcaaaattcggtgtgatcgtcagctgcattgtgcggaccccgcggtgatgagataataattctgtgatgtggttttcatggattccccctcacatggctggtggcctccccaaaggctgccagcctcccttctgattcagctcccctgaaaaaatcactcttccagaaagaaccctttttgtttctcagcgcctgagcgccttgtactggtttgctgatacgggcgtttttttaattgcgcccttaagacagtgatctacttaaccaatggatctctcctgttggaaaagaccctgttcctacccctacacccaatccccccttacccccctttccctcttccccataaaaacgtactacttacctagtacgaacggagaattgagtcagtgggttgccaacctgaacaggcacctttaagcctgtttttgtccgggtacctttaaacccacaacaatcaggaacgcggtgacgttccggccaggggaggttcggcggtatacccctgtaaagccctgccgtgatttctcacaaacaggcgaagccgcatatttgcttcatgccttgcccggttctccttgcggtatgaaacgggctcggcttcgaacgattcctgatacacagctgcataacgctgaatggctttttgtcgtgctgctggcgtcaggctcagtaactgctgcttgatccattcttcatctgcagatgcgtaaacagatgggagcagaccgtgatcaggcctcatcccgtgcaacgtcatctgaaaatacctcgtccaaacttgtatccaggccaagctgtttaaacgcgctgacgatccgctttcctactgcaacatcaggaatccttcttcctgtttcgtagtggctaacggccccctgagagctatcaatcagcgcggccagctctccctgagttacctttgctttgcgtctaaggctcttgattccactcattcgtttagtcccgcataaataatacataacgtactatacacacttacaagaataatacaaaatggaagttgctcactaaatacggaatgtaataatcatggctatgaaacagagatggcaggacctggccaaaaccaggatgaaagaagtcggcatgactcaagaacagctggcagaagcgctcggcataacgcagggcgggctaggccattggttaaatgccagacgtgaaccgaacctagaggttatagcgaagatttttaacatattgaaaatgcccggcttcgtagtaaacgctgacggcacggtcagcgactcaagagccgatcacaatgtaagttttaatagcattaacgaatccaaaggaagttaccctgttataagctgggttagcgctggagactggatggaagcagtagaaccttatcaccgtagagcgatagatcgctggtatgacaccaccgttgaatgttcagaggattcgttctggttagacgtcagaggcgattccatgacatcaccagcagggctgagcataccggaagggatggtgatacttgtcgatccccaagtggaagcaatcaacggaaaattggttgtagcgaaacttgacggtgacaatgaagctacattcaaaaagcttgttatcgatgccggtcaaagatttctaaaacccctcaacccccaatacccaataatcccaatcaatggcaactgccgtattataggggttgtggtcgacgcaaaaatcaccaaccttccgtaaattggccgcgaaagcggctttttttttgccttcaacaccctccatgcaactaaaaaaacttgaaaaacaaaacgatgtaaaataatacactcaaatactccattttgtattgatcttatttaatacgttatgtattgtttatgcattggcggattaatggagtgcaaaagatgagtacagagaaattttttcaacttgtagatattcccgattaccgtttctcttctgataaagagaaatgtcaaaacattgatttcgataaaattgctactgactgcgatacgaaaacaacctctattttagaagccatcaatcatatagggattagcataatgagtgaggttgaagaaaagaacttagataaaaacaaaataatgatgctttctggtgtgattgcagacctcgcagaattagcaatggctaccaataaaatagctaactcagcaacatattcctccggttataaggacgcaaaaaatgtctgatatcactttgcaaaaagcggcatcaaaggcttaccaggctgagattgttgcgaggatgcttgagaactaccctcataaactgaccgactcagatgtggaatccgtcgcatcacttttggcggatctcattggcccggttgcggcttaccttattgagcaagagtctaaaaacccggcttaaaaattaattagtcattttaattacaggaataatcctggggattcctgcaatcaaattaagggtaaccatgattaatcgacaagcgtttaaaacagctcagttatttgtctcattcggttattggtctatagccatgctttatttaaaaaaggcttacggtaaataaaaatgaataatttaactaatacctatcgacgcagaattttaaaggctgcgttattacgccaccagcgtaaaacgggcagtaactgccttgttattaagctcaataaaggcggtattaacacggtcgagttaacagagattcttctcgatggattattacgaaaattcgaaaggctcgcgatcagtgagtacgggaatgtcgaaggcgtaaaagctatcaagggaatttacagcagcgctgttgatgttaatggcagcggtgaattcctcacagatagcggaaaggaattaatcgacgaactcatttcagagctggtggagttcgtaaaaaagcagaaaccagttaattcggagatcggcaatggctaaccaacaaacaattccctatcagggtgttctgatcccccggcccgtgctgaacgtggatctgcatgtcctcccggattttaccgggcgggtagtcctgcacatcgagaacgggagggtgatatgcgaccgccggctgttcgacgacgagcacatttgctcactagccacgtttatcgaaatggcgcgcgaaatggagctgagatttgaggaggtagctggtggcactgacagcgatacgaattcctgagtgggttcacctcaaagcagcacacgttttaagccagttcagagcaaggcgcattcatccatgccgtatgcacggctccggtaatttgagcctcaaggttaatcaccgctggcggctgctatcacgagatggcggcaagaactgggaagtaatgagtcacgaacgatacagcaaagttaaggaccggaaatgaacgataaacgcatcagcaccacctcaattgacagcgccttttccaaagagctacagcctgtttacgtcgtatcaaggcacggctactcgcgccgtttcctcagcaggagcgcggcgatcagcaaccttgctcactacatggtaaccaaaacttttcaccgtgccggtttgaacaccaacgaaccagacgagccttttttcagcaatggtgtgctcgtcaatcgcatgggccagcacacacagcaatatctctttgcacataaccgatgcatgcggcgcattcgccgaattctggaacgcaagcgcgaagcacttaagtggctcggtaagtgggacgcgatgcatgaccgattcgttaaagaggttgatgcactgcaggccatcaaaccagcaggggtgaaatgatgaagcccttcattttcagcatcattgtttccatgctgctggcggccaccgttatcggcgcgctgattgaatataaatttttggtgaagtagcgaggcactccatgaaaaagccagttttagaagttattaagcgttggagacgtttagcaacggaggccaagcagctgaagctcgccaccatccctatcgacccggaaaatatgctgatggtgctgggggaacttccaaccagtgaagactatcaggctgcaatcgattttttacgcaagagagcggccagcgaacttgatggcggttttagagcgcaccacaacgcacttatctatgcggcaaatgaactggaaaatgcccaggcatttgggcgggaggtcggtcatgagtcttgattgcgtacctctttcaacctactgccgggacgccggagaaacggttgaagccgttaacaaacggatacaaagggggttatggaaagagggtgtccatgtattaaaagtcgatggcgttaaagaacgctggatagacttaacggaggtttcaaagtgggcaagaaagaacaaggatcattatctctcccaagaggagtgaccattcgccagcataaaactggcgataccctggtgatcacattcacctacaagggggttctctgccgggagcccctttccagaatggaagcaaacgcgcgcggcgtgaagtatgccgagcgcctgctgggggagatacagaaccagatcgccggcggcacattcgattatgcgaaatacttccccacctccaaaaaactggagctgttcggggtagtgaagaaaaccaaaaatattaagtcctacctggacgagtatctgaaaatctgccagaaccgcaacctttcgccgtccactattggcggttatgaaaagtgcctgtctgcgctatctgcgctgcacaaaatgcatgtctcggaactgacccctgcggtcctcaaaaactggatcgccagcagaaaaacaaagctgaaaacgatcaggaataacctctcgtttctgcgcagcgccatagatgaagcggtgacagacggcctgctgactatcaacccggtaacccttgtcagcgcgagtcggtaccacgtgatcgacagcagcccgaatagtgacgattacgaagttgatccgttcacaccagcggaaatcagcgctatttaccagagctgcagataccaagagtgggaaaacctgttccgtttcgcattcaatactggtttacgcagctctgagctgtgtgcgttgcgctggcctgatctcgacaatatcgctaaaacagctcacgttcaggcggcaagtgttgttggcgttctgaaaggtaccaaaacaaaagccggtacccgtaaagtagaattaaacagcgaggcgctggccgcgctgcagacgcagaaacaattcactttcatgaaaagcgagtttattttcagcgatcccaaaacgggtgagccctgggcgaacgccgacgcgatacgaaaaaaagcatgggtgccaaccctcaaaaaagctggcgttcgataccgtaacccgtaccagacccgccacacattcgccaccagacacattagccagggcgtaaaccttttctggcttgccgggcagatggggcataaagggccggaaatgctgttccgcaattacggtaaatacctggctgaatacgacgggaaaaccgccatttctgcagctctgtagcgtggtgaatatttcaaaatgttggacggaatcaggacgttagagggaccacgatatgcacgtaaaatgcacttgagaccttttaaaaaatgcaaagaattaatattcaataggttaggtattatttggacacgggttcaactcccgccagctccaccaatcatgattggacggtgtaaggacaacaccaacaaaaacaggaagttagaagtctcagcaaaacaccgaccagacggtgaggagacataaaaggatacgcaaaggagccgcggctcctggtaacatgaaagcccacagatgtgggctttttcgttgatggtcagaacgaccagttcacaccagctaccgcgttccacggggattccacaccggcactatggctataccccaccccaagatgcccgcttaacgtactgctgaatgaggctttaatacctgcctggtatattccacgtctgcccgacaaataattgacgaaattaccgtcactattcactttcacccggttatcatcgacaaattctttgcgcacagccgccttcagccacggctcaacttccataccgttccccagacgcatgttgtaactcagcgttgcgcccagttcacgatatatactgcgggtatcgactgatttcgatttcatgccattggataaatgatattcggggttatcagcggtgaaccccgttaacgatgcatacggcgtcaggttccagttaccatcggtaaatcgcatcccggtttcaatgtgaccgcccagcccgttgctgtggtaactgccattggcggctccaccgctgctcattttacctgctacgttacttttaaaacggttcagcttcacgacaccgtccagatagaaaccactttcatgttcccaactggcatagccgcccagagaataactgcccacactgccatgtcctccgcgatcaaaaccgatatgtgaatgggaatagcccataaaagcgcctagcgtggtaattccttcaggaatatcattacggctgtcgatccccactgtcattccggtcagcgtctgctcaaacccggcacccgcatcggtggtgacattattacgggtgttatacgtcgccccccagacattattgttgtgtggactcgctttcattatgttcaaccgctcgcgaatactgtttagctcagcatcaaataccaacggtaatgttgctgccatattgagtacggctgccgtagaaggcgtaatgcgtttctccggaacgggtgtcggcgttggatcgggagtagggtctggttttggatttgggtctggctttggatcgggttttgggtctggctttggatttgggatggggtccgggttgggtttgacatcattggtcaggttccagttgctgttgccgtcacttttcaggacatactcataggtcccaagatcaacgaaaccgccggtattgcccagcgtaaacgaagcatcccctccccctgttttcaccagcgtcatcgcgtcgtcagactgtgggctgacgccggtatcctgaacaaagattttaaaattaccagtggcgttgttgttgacgaccagttgatcgccccgggagcctgcaacgttggtatgcaggtagaaattaccgctaccggaaagttcattggttgtcagcgtattgtagataccgttagttgtggcaggcgctgctgtttgtgctgacaaataaacatcaccgtcgttgagtagcaaactgtttactctatattcgcagttgctggtacctgcacaggaattattgctgttaagccagacactgccccggctggcagccgtcaggtcggcaagcgtggtatcgacgccatttcccagagtcaatgtcgcgctatcggtaatccggaccgccccttcgagtttaactggcgtaacattatcccgtggcgtcattaacgacaggcttcctgtcgcgccactgaccgatgcatccgccagcgtacctgcgtagacgattgccgtaccgccagcgacctggagatcttctgcccgggccagagcctgaaactcatcttttgaccgcccaagggtatattgcccgccagagttaacctttgtggcggagtcctgacccaggttttgcattgccccacccttgccaaccgtggagtcgcgagcttcggtacctgctaataccaataaattaccgccattttccagcaacatattggtcgctaaattgccggaaatggaaaaagtaccgtactggtgagtaccgttgatttcaataccgttagccgtgctcgtctggagagcggcaccgctgttctggacgatatctgtcgctttgccattatcgttgactgtcagcgtaccgccttcattgatctttgtttttattgcctctccgttagctgaaactgtttgtattccgccgtcgttaattgttgtctcattcgccacaccctcgacaatttgttcaccgccggtgagcgtcgtgcctgtcgcagtggcttttgttttgacgatctcccgtccgcccatattgacctgtgttttgtcagaagaggtgtctgactccacggttaacacgccgccatttgccagcaggatattgttcgccgcaccctgctcgatgctgaacgcgacgccatccgcgcgtgttcctgtgacccgcgtcgccctggtggttgcaaccaaagcgccctggctactctgctgtatccccgttgcgctgcctttctcccgcacatcgagtgtgccgccgtcattaagcaccgagttttcagccagaccgccctcattaactacctgtgaacccccattaataatggaatcttccgctgtcccgtttgccataatttgttgtaggccagagacgatatcggtattgatcgccttaccataattctgaacggtttgcgtgccaccattgatgtgtgttttatctgttgacccaccatcaacaatttgttcaccactttcgatatttgcctcagtggctaaaccatataccgtttgcttgccacctttgatatttgctttatcagaagtggcactggcatatattgtttgggtgccagaactattaagtacagtgccaacatcttttccataaacatccattttgccgttggcattaataatcgtatcaactgcccgggaaccagtgacgactgttaatgagccagcgttttccagcactacatttttagcttctgaattcctgatgtagaaagcatcaccataactgttggttccttcgataagtgttccggaagtcgtggaagcaattaatgcgccgccggattgttgctctacatgcttagcctctccaccgtcctgaacctccagaatgccgccattgttaagtctggtggtatctgttttggcctccttctggacgatcagtttaccgccagcatcaacggtggtatttttcgccgaggttttagccactaccgtcagttcgccggtattttccagcacaacataattagcctcccctccggtaatagtgaagtgagagagcttgttgtatccttcgatatcagtccctgcgcccgtgttggcaactaaagcactgcccgtctcctggttaaccccatgtgcaataccgccggtatagacaatcagcgagcctccggcgctaatattgctgccaattgccgtaccatctttctcaacaacctgccggctcccggaggatataattgttgtgtcagctttcccgccgcttttgatattttgcgttacgctgttgatattggtgcctgtggctatgccataattattaatattctgtgtgccaccattaattatggtatttgtcgcgtttcctgcaacatccataaccccgccattatctattcgggtcgcatcagctttagcattggttaaaactgacattgttcctttatctttaataatcgtcttgtttgcggaatgagatacttctaaatggcctccatttttcagcaacacattgtctgccactttattgtggatggagaatgcaccttcactattcgtaccgctcaccgtcgtaccgttagtgttagtttttaaaattgcaccatcgtgctgggtaacatttgttgccgtaccaccactaacatcaagcacgccaccagaataaacttcaataacatccgaggtgctggtgttatcaacaatttgcgtgccaccagaatagatatgcgtattttttgccgttgacttactattcagagactgagttccgccttcaatcgtcgtgtccagcgcacggctctcatatactctttgctcaccgccatttttaatggtggttgtttctactgtgctctgttcaacatactgtcgaccaccatttatggttgtgttcgttgccagacttccttgcgtgatgtcctgagagccagacttatttatcgttgtactgtcgacatgcccctgagttgttactcgttggctgccaccatcaatgattgttccattcgcagtccccccctctatgcgtgaagtaccgcccttaattgtcgtgtcattgctggtaccacctttatgaacatattgattgccactttcgattatcgtgccagtagaaattcctccgtactcaattgactgtctgcctccattaatggttgtattattagcttgcccgttaatatcggcatggattgatactagttgctcgccaccagtttcaataatactactattagatatcccaccatagacctcctgctggccatggttgataatatgagtgttatttgttgtacctcgttcatctactttttggacaccatctacagtctcatcgtttaccacaccaataacattagtagtaaaggccgccatcacgggcggggcatatatcaaggcagatatcaataaggaaagtactgagcggcgaaaataatggggactggtcctgttcataaatttcatcctctgaaaagtgaatactgagtagcgtttaagcgaccttagctttgctgcaacatcagcccacaggcaccagaccaggggattcatcctgaagagacagcgcaagtgtattgtgttcaccgctcatcaaagacatcatgatgaaatggtgatattccgcataagaatgaggcattttttaaacgcagtgcgctgaagtgtggttggataaaaaagtcaatctattcaggaaacacgggcgtattcttttctttcgacaatcaggcagttggcaaaataaaatgatttacataatcgtttctgatgaatatcttctgctcacataaaaatcacacaataactttgagatcgcagattgttttacttttacagcattcgtccccccattgttgggcaaatatagattgggccagagcacgaaagttaataccacgttcgcacagctcctccaacagcacgacaagatgccacatactgcgccccagtcggttcagtttacagactagcagtgcgttccctgccgatgatgtcctgaccagttttttcagtccggacctcctgccacggttttacgttgaagtggtaaccctgagcacgcagttcttcagtcaggcgtggtgcaccgtaacgctgttattgctgggtaagatcaaaaaactttcaggcagctaaggaaagttgaaccagacattagatgaaatatttcaaccaattacagcaccaattcagtcactgccagcccaccaaataaatcaaggggttacatgaaaacgtagcccctttttctttggtagtgacactaaaatggatgtagtgtgaagaataatcccgtttactcaatcaataatacatattgtttcaatctacgttattatctctttgtaaaaattgccatttattaatcattgaaaactgcttttagaacttgatacaacgggactagtcacaacaggactattctcaacgggatcatcctcagaggaactatcatcaaagtcatcatccataaataaaatatcatcgaatggtgccacgcccgtgatgagttttattttattattacgatcagtcaatactccacttaaaccgttttcgctcacaggttttaatgatttttcattactcttgttgtaagcaggcgcattaaaaatacacggagtatcaacatcaaacaatgacgttccccagttcacatattgaatatcatagttactgaagttctgtccagaaaagaagcaccccttaaaatccaatccacgtaaattatataaaccaccctcttctttttggagagtaatgttaattttggctatctcccggacatcatcgccatttttgtatttgaataccgtttcaagatgttctccagacagcttgacttcaggaaataatttgaaatcaaagcctatattattatgtgtcaacgtagatgaacaaaaaatggaaaaagcttgcagtgctgaattatagctatcgattttatcttgaggctgagctcttggtaaaaacttatagcaacactcataaaaattaaacagaagctctgaagaccttgtatttttatcaaataatacccccttgaactcattcacaaacacatcttttttttcttgaatatctatggggtgttcctttgactctgacaaagatgaaatctcatctattttgttttcatatgaattacgtgattccatacagacatttggcggcgtttctaaaataacactacgcgtactacttggcttaagtaaaccaacatgaaaatcactttttcttatattatcgaaaaggttctattcatttcttttagcgcattcaaaaaactgatcggcattatttttattcgataattttttagtttcagaaaacacattttcattgttttccagctttagtttaatgagaagattttcccagacctgcttgcttaaacatattacgtcaggctcaccagaactaactaactcgtgattattattaaagtgtacgttgaatacctttaagttattttcaccaacttcatatttaatacgttttaattgttctccagctcccataatgacaaaggcgttgccttcttgatatatacattcagacatcattttttgtaaagtttcaagagcaccgcgatacgtctctgatgcagcttccttacaaattaattttaaaatactatgagctagtagctccatgtgtttagaagatttattttcattataacttccactacccaaaactgcgctagcgttaaatccgttgcttttactaactaacattgtctattcctcaattaatgtctacatggctatttttaatgttattactgtttgtcactataaaaaaacgctcatttgagacaattactgacattaactgcttcacttgctacgcatggaacttttaattaaattagcacaggaatgttaaatttaataaacaaaaggttatttcgctgtatgataaaaaaaaccgttataatttattagtgaaaatcgtttttcaagtgttagaaatttatatctcaatagcgttggttaatgagcatagccacgctcctgtaacgctcacaaaactcatctgcctgcggcgggtgttctggtcagtagtagatgtttaaggcgtggcagagacatttcatccttactctacggcattgttctacatacattggttgtggtactcacttatcatcagtgagcgaacagagaatagttcagtgatttgagtaattaacctgattaaatgaaggggtataataaatgataatactctggctttatcgttaattacttaattccacatgtaagcaatttgcccgcttggcatagcaggcattttttccaggtacttttgaatgagtactgatggataaatacattgcagtggcgtgccacgtaccaaaacaccagccctcattcgaaaccacccaccgcacttcttccttgaaatggcgttagtcatgaaatatagaccgccatcgagtaccccttgtacccttaactcttcctgatacgtaaataatgatttggtggcccttgctggacttgaaccagcgaccaagcgattatgagtcgcctgctctaaccactgagctaaagggccttgagtgtgcaataacaatacttataaaccacgcaataaacatgatgatcatatgatgtaaataacagatttttatgcgttcccattcaccttgggtcgtgattacacgcgacataaaacccgacaccgcctccattcgcaaagtcgatactcgcagtcaacaagcaaatgttaataattagcactatctatagttatcatcgattcaatgatactttgtaatgattttgtatctaataatataactttattacattagctgaagagttttcgcatcattatgatatctgttacttttcactccataaaaataaacttcgtatagcaatatattctttcatagatcttattctgctaatcattagtttcgtatgagcgatttttgacagttgcctctccagaccacatcgataattaataaaacagatttaagcattatccttttccatataaatattggataaaagtaggacatctgtttgcaattactttcacaacaattaaacatttttatgtttccgtatacatcatattactctaccattagaggaactttattatgttttctataaaaccaggacccagaaatttacctatcgacaaccccacattgttatcatggaacattactgacggggatctaaattccaaattaaatacattagaatatctaaactgtataacaaatattattaattcttgtggagtttaccctcaaggattaaaagacagagaaattatatcaacttttcacgcagaaaaagttattaatgatctgttaaaaaacgattataaaatttccctttctccagatacaacttatcgagagttgaataaagcagcacagcgtagcattacagcgccagacaggataggagaaggaaaaacatgggtttatcaacgagatacaatgattgaaagaggtgataacagcggtgtttatcagtatggtcctgctgaacacttcacccacattatatctgacaaaccttccccaaaagataaatatgttgcatatgctattaacattcctgactatgagctggcagccgatgtatataatattaacgtgacgtcaccttccggacagcaagaaacatttaaaatattaatcaatccagaacatctacggcaaacacttgagcgtaaatctcttactgctgttcagaaatcacaatgtgaaatcatcacccccaaaaaacctggcgaagcgattattcatgcttttaatgccacctaccagcagatcagagaaaatatgtctgaatttgcacgttgccattatgggtatatacaaatccctccagtgacaactttccgtgccgacggaccagaaactcccgaagaagaaaaaggttactggtttcacgcttatcaacccgaagatctttgtaccatccacaatccaatgggagatttgcaggattttatcgcattggttaaagatgctaaaaaatttggtatcgatatcattcctgattatacctttaactttatgggaatcgggggtagtggtaaaaatgacctggattatccctctgctgatatacgagcgaagatcagtaaagatatagaaagtggtatccctggctattggcaaggtcaggttttgattccatttactatagatccagtaacaaaagaacgtaaacaaatccatccagaagatatacatctcactgcaaaagacttcgaagcaagtaaagataacatctctaaggatgaatgggaaaacctccatgcattaaaagaaaagcgtttaaatggaatgcctaaaacaacacccaaaagtgaccaggttattatgttgcaaaatcaatacgttcgtgaaatgcgaaaatatggcgtacgaggtttacgttatgatgcggcaaaacactcaaaacatgaacaaatagaaagatcaataaccccaccgcttaaaaattataatgagcggttacacaatactaacttatttaacccaaaatatcataaaaaagccgttatgaattacatggaatatctggtaacttgtcagttggatgaacaacaaatgtcatcactgctttatgaaagagatgatttaagcgccattgatttttcattgctcatgaaaacgataaaagccttttcatttggtggagatctccaaacccttgcatcaaaaccgggttccacaatctcaagtatcccatcagaaagacggatattgattaacattaaccacgattttcctaacaatggtaatcttttcaatgactttctatttaaccatcaacaagatgaacaattagcaatggcatatatagccgctctgccgttcagcaggcctttagtttactgggatggccaagtattaaaatcaacgactgaaattaaaaattatgatgggtccacgcgtgtcggcggtgaggcgtagcttaataaaggttgctctacctatcagcagctctacaatgaattccacgcattatatatagataaagcaggaatatggagcgcatttgagggtgtatttgcaactaaaaacgttctggcctttagtcgtggggattctgtgaacattaatcactctcctcatgatggactagttataataaataaaggaaacgaagaagttgaaggtacctggcctaacaaattgcaacctggaatatacaaaaacatggggagtaatagcgttaacattattattaataatacccgaaaaattatcccccctggtaaagtatttacgcttagaggcggaactctaaatatcaatattcctgggcgtagcgctcttcttttagggaaaacaggagaaccgccgaactatctctatttataatttaatgttatatctgccccgataaaacggggcagataatatgtttagtttactaacggtcattttgcagtgaagccatttactgttttttatcgaccagataatctgttctctaatgttaactccccctaacctgttgctttagttattcatttcctgtctcactttgccttaataccctacgttaaatgttactaatttgttgcttttgatcacaataagaaaacaatatgtcgcttttgtgcgcatttttcagaaatgtagatatttttagattatggctacgaaatgagcatcgccatgtcaccctacatctcataagaggatcgcttctgatgaatgcactgaccgccgtacacaataacgctgtcgattcaggccaggactatagcggattcactctcatcccgtcggcgcaatccccgcgtctgctggaactcaccttcaccgaacagacgaccaaacagtttctcgaacaggttgccgaatggcccgtgcaggcgctggagtacaaatcgtttctgcgttttcgggtaggcaaaattcttgacgatctgtgtgcgaatcagctgcaaccattgctgttgaagaccctgctaaaccgtgctgaaggtgcgctgttgatcaatgcggtgggtatcgatgatgtggcgcaggcagatgagatggtgaagctggcaacggcggtagcgcatctgattggtcgctcaaatttcgatgcgatgagcggtcagtattacgcgcgtttcgtggtgaaaaatgtcgataactcagacagctatctgcgtcagccgcaccgcgtgatggaactgcacaacgacggcacgtatgtcgaagagatcaccgattacgtgctgatgatgaaaatcgatgagcaaaacatgcagggtggaaattcgttgctgctgcatctcgatgactgggaacatctggaccactatttccgccacccgctggcgcgtcgcccaatgcgctttgccgcgccgccgagtaaaaacgtcagcaaagatgttttccatccggtgttcgacgttgatcaacagggtcgcccggtgatgcgttatatcgaccagttcgtccagccaaaagacttcgaagaaggcgtgtggttgagcgagctttcggacgccattgaaaccagcaaaggcattctttctgtgcccgttcccgttggcaaattcctgttgattaacaacctgttctggctgcacggtcgcgaccgctttactccgcacccggatctgcgccgtgaactgatgcgtcagcgtggctatttcgcttacgccactcaccactaccagacgcatcagtagcgcaaaggaattgagcggatgtatgattttgtgattattggcggtggcatcatcggcatgtcgaccgccatgcaactgattgatgtctacccggacgcccacattgcgttgctggaaaaagagtccggcccggcctgtcaccagacgggccacaacagcggcgtgatccatgccggggtttattacacgcccggtagcctgaaggcacagttttgcctggcgggaaaccgcgccactaaagccttttgcgatcaaaacggcattcgctatgacaactgcggcaagatgctggtcgccacctctgaactcgaaatggaacggatgcgcgcgttgtgggaacgcacggcggcaaacggtatcgagcgcgagtggttaaacgccgatgaactgcgcgagcgcgaaccgaatatcaccgggctcggcggtatttttgtgccgtccagcggcattgtcagctaccgcgaagtgacagcggcgatggcaaaaatctttcaggacagaggcggcgagattatttataacgccgaagtcagcgcccttaatgagcataaaaacggcgtggtgatacgtacccgtcagggcggtgaatatgaagcatcgacgctgattagctgttccgggctgatggctgaccggctggtgaaaatgctcggactcgaaccgggctttatcatctgcccgttccgtggcgagtatttccgccttgcgccggagcataaccagattgttaaccacctgatttaccccatccccgacccggcaatgccgtttttgggcgtgcatctcacccgcatgatcgacggcagcgtgaccgtcgggccaaacgcggtgctggctttcaaacgtgaaggctatcgcaagcgcgacttctcatttagcgacacgctggaaattttgggctcgtcggggattcgccgggtgctgcaaaaccatctacgctcaggactgggcgagatgaaaaactcgctgtgcaaaagcggctatctgcggctggtgcaaaagtattgtccccggctttcgttaagcgatctccagccctggcccgccggtgtgcgggcgcaggcggtatcgccggacggcaagctgattgacgattttctgtttgtcaccaccccgcgcacgatccacacctgcaatgcgccctccccggcagcgacatcagcaattcctattggtgcgcatattgtcagcaaggtacaaacgctgttggcaagccagagtaaccccggacgcacgctgcgagcggcacgtagtgtggatgccttacacgccgcatttaatcaataacctttgaaaacaggacgtaacaatgaaacttaacgacagtaaattattccgccagcaggcgttgattaacggggaatggctggacgccaacaatggcgaggtcatcgatgtcaccaatccggcgaacggcgacaagctgggtagcgtacccaaaatgggcgctgatgaaacccgcgccgctatcgacgccgccaaccgcgctctgcccgcctggcgtgcgctcaccgccaaagaacgcgccaacattctgcgcaactggttcaatttgttgatggagcatcaggacgatttagcgcgcctgatgaccctagaacagggcaaaccgctggctgaagcgaaaggcgaaattagctacgccgcctcctttattgagtggtttgctgaagaaggcaaacgcatttatggcgacaccattcctggtcatcaggccgataagcgcctgattgttatcaagcagccgattggcgtcaccgcagctatcacgccgtggaacttcccggcggcgatgattacccgcaaagccggtccggcgctggcggcaggctgcaccatggtgctgaagcctgccagtcagacgccgttctctgcgctggcgctggcggagctggcgattcgcgcgggcattccggctggggtatttaacgtggtcaccggttcggcgggcgcggtgggtaacgaactgaccagcaacccgctggtgcgcaagctgtcgtttaccggttcgaccgaaattggccgccagttaatggaacagtgcgcgaaagacatcaaaaaagtgtcgctggagctgggcggcaacgcgccgtttatcgtctttgacgatgccgacctcgacaaagccgtggaaggtgcgctgtcctcgaaattccgcaacgccgggcaaacctgcgtctgcgccaaccgcctgtatgtgcaggacggcgtgtatgaccgttttgccgaaaaattgcagcaggcagtgagcaaactgcacatcggcgacgggctggataacggcgtcaccatcgggccgctgatcgatgaaaaagcggtagcaaaagtggaagagcatattgccgatgcgctggagaaaggcgcgcgcgtggtttgcggcggtaaagcgcacgaacgcggcggcaacttcttccagccgaccattctggtggacgttccggccaacgccaaagtgtcgaaagaagagacgttcggccccctcgccccactgttccgctttaaagatgaagctgatgtgattgcgcaagccaatgacaccgagtttggccttgccgcctatttctacgcccgtgatttaagccgcgtcttccgcgtgggcgaagcgctggagtacggcatcgtcggcatcaataccggcattatttccaatgaagtggccccgttcggcggcatcaaagcctcgggtctgggtcgtgaaggttcgaagtatggcatcgaagattacttagaaatcaaatatatgtgcatcggtctttaactggagaatgcgaatgaacagcaataaagagttaatgcagcgccgcagtcaggcgattccccgtggcgttgggcaaattcacccgattttcgctgaccgcgcggaaaactgccgggtgtgggacgttgaaggccgtgagtatcttgatttcgcgggcgggattgcggtgctcaataccgggcacctgcatccgaaggtggtggccgcggtggaagcgcagttgaaaaaactgtcgcacacctgcttccaggtgctggcttacgagccgtatctggagctgtgcgagattatgaatcagaaggtgccgggcgatttcgccaagaaaacgctgctggttacgaccggttccgaagcggtggaaaacgcggtaaaaatcgcccgcgccgccaccaaacgtagcggcaccatcgcttttagcggcgcgtatcacgggcgcacgcattacacgctggcgctgaccggcaaggtgaatccgtactctgcgggcatggggctgatgccgggtcatgtttatcgcgcgctttatccttgcccgctgcacggcataagcgaggatgacgctatcgccagcatccaccggatcttcaaaaatgatgccgcgccggaagatatcgccgccatcgtgattgagccggttcagggcgaaggcggtttctacgcctcgtcgccagcctttatgcagcgtttacgcgctctgtgtgacgagcacgggatcatgctgattgccgatgaagtgcagagcggcgcggggcgtaccggcacgctgtttgcgatggagcagatgggcgttgcgccggatcttaccacctttgcgaaatcgatcgcgggcggcttcccgctggcgggcgtcaccgggcgcgcggaagtaatggatgccgtcgctccaggcggtctgggcggcacctatgcgggtaacccgattgcctgcgtggctgcgctggaagtgttgaaggtgtttgagcaggaaaatctgctgcaaaaagccaacgatctggggcagaagttgaaagacggattgctggcgatagccgaaaaacacccggagatcggcgacgtacgcgggctgggggcgatgatcgccattgagctgtttgaagacggcgatcacaacaagccggacgccaaactcaccgccgagatcgtggctcgcgcccgcgataaaggcctgattcttctctcctgcggcccgtattacaacgtgctgcgcatccttgtaccgctcaccattgaagacgctcagatccgtcagggtctggagatcatcagccagtgttttgatgaggcgaagcagtagcgccgctcctatgccggaggcgacgctgcgcgtcttgtccggcctacggggatccaggtcggataaggcgtttacgccgcatccgacaatctgtacgtgaacaggaagaaatctatgttggccgggtaaggcggagccgctctccggcaaaaagaatcaataacaattatacgcgtgacccggcgcgggaaatgtcggggcgctctcccaagtgacacactttcgagaggattcaggatggggcaatcatcgcaaccacatgagttaggcggcgggctgaagtcacgccacgtcaccatgttgtctattgccggtgttatcggcgcaagtctgtttgtcggttccagcgtcgccatcgccgaagcgggcccggcggtattactggcctatctgttcgccgggctactggtggttatgattatgcggatgttggcggaaatggcggttgccacgcccgataccggttcgttttccacctatgccgataaagccattggtcgctgggcgggctataccatcggctggttgtactggtggttttggatactggttatcccgctggaagccaacatcgccgccatgatcctgcactcatgggttccaggcattcccatctggttattttccctcgtcattaccctcgccttaactggcagtaacttattaagcgttaaaaactacggcgaatttgagttctggctggcgctgtgcaaagtcatcgctatcctggcctttattttccttggtgcagtcgcaattagcggtttttacccgtatgccgaagtgagcgggatctcaagattgtgggatagcggcggctttatgcccaacggtttcggtgcggtattaagcgcgatgttgatcaccatgttctcgtttatgggcgcagaaattgtcaccattgccgccgcggaatccgacacgccggaaaaacatattgtccgcgccaccaactcggttatctggcgtatttctatcttctatttatgttctatttttgtcgtcgtggcattaattccgtggaatatgcccggactaaaagccgtcggttcttatcgctcggtactggaattgctcaatattccccatgcgaaattaatcatggactgcgtgatattactttccgtaaccagttgcctgaactcggcgctgtataccgcgtcaaggatgctctactccttaagccgtcgcggtgatgctcccgcggtaatgggtaaaatcaaccgcagtaaaaccccgtacgtggcggtgttactctccaccggcgcggcattcttaacggtggtggtgaactattacgcgcctgcgaaggtatttaaatttctgatcgacagctccggcgctatcgccctgctggtttatttagtcatcgccgtttcacagttgcggatgcgcaaaattctgcgagcagaaggaagcgaaattcgcttgcgaatgtggctttatccgtggctcacctggctagtcatcggctttattacctttgtgttggtagtgatgctattccgtccggcgcaacagttagaagtgatctccaccggcttattagcgatagggattatctgtaccgtgccaattatggctcgctggaaaaagctggtattgtggcaaaaaacacccgttcataatacgcgctgatcatgatcaggagtcacaccatgaccattacgtctctggatggctatcgctggctgaagaacgatattattcgcggtaattttcaaccggatgaaaaattacgaatgagtttgctgacatcgcgttatgcacttggcgttgggccgttacgggaagctctttcgcaactggtggcggaacggctggtcacggtggtgaatcaaaaagggtatcgggtggcgtctatgtcagagcaggagctgctcgatattttcgacgcccgcgccaatatggaagcgatgttagtgagtctggcgattgcccgcggtggcgatgagtgggaggcagacgttctcgcaaaagcgcatctgctgagtaagcttgaggcctgtgacgccagcgagaaaatgcttgatgagtgggatctgcgtcatcaggcgtttcatacggcaattgtggcgggctgtggttctcactatttgctgcaaatgcgtgaacggttgtttgatctggcggcgcgttatcgatttatctggctgcggcgaacggtgctttcggtggaaatgctggaggataaacacgatcagcaccagaccctgactgcggcggtactggcgcgagataccgcgcgcgccagtgagttaatgcgccagcatttactgacgccaattcccattatccagcaggcgatggctggcaattaactactcttccggaatacgcaacacttgccccggataaattttatccgggctttttagcatcggtttattcgcttcgaagattttattgtacagattagcgttaccgtagacctgtttggaaatggcactcagagtgtcgccagacttaacggtataaaactggctggcagtggctggtgtcgccgttttcacctgatcatcgacactggcaataccggaaatattccccaccgcaacaaggattttctccttcgcctcctgactcaggccgtcaccagtgaccgtcgctttgccgtcggcaatttgaatattcactttatcggcatccggtataccggttttgttcagatgctcctgcaccttcttcgcctgatcgtctttatcgtgctgacctgtaaccgcgtcccagagtttttctccggcatctttcacaaaattgaacagacccatagctacctcattcgttaacggaaacactcagaaagtgtagcagaggaacgcggcgcgttaacgccgcggggatgagcacaggtttaatcgcgggtttgcacccagaacgcgtgaatcaaaccggggatatacccaagcagtgtcaacagaatattaataatgaacgcccaaccgaaccctttaccgagcagcacgccgagcggcggcagaatgatggtgatgacgattctccagaaacccatatgtactccctataagaaaattactcattgtttaaaaagagattttatctcttaagcgtagtaattttagcggagcctgccagtttcagcttacgcttttactctcatttacgctgctgaggctggtatatgttgcatttttagtttagagtttacttaatttagaaaatacttaaataaatatgactgaactcgcgcaattacaggccagtgccgaacaggcagcggccttattgaaagcaatgagccaccctaaacgattgctgattctgtgcatgcttagcggttcccccggcaccagcgcgggagagctgacgcgcattaccggactgagtgcctctgcgacatcacagcatctcgctcgtatgcgggacgaagggcttatcgacagccaacgggatgcccaacgcattctatattccattaaaaatgaggcggtaaatgccattatcgccaccctgaaaaatgtctattgtccgtaaggagtcactatggctttgacaaccatttcgccgcatgatgcacaagaattaatcgcacgcggcgcaaagttaatcgatattcgtgatgctgatgaatatcttcgtgaacatattcctgaagcagatctggctccattatccgtgctggaacagtcaggtcttccggctaaattacgtcacgagcaaattatattccactgccaggcaggtaaacgcaccagtaataatgccgataaattagcagcgattgccgcccccgcagaaatctttttactcgaagatgggattgatggctggaaaaaagcaggattgccagtagcggtaaataaatctcaacccttgccgttaatgcgccaggtgcagatcgctgcgggtggtttaatattaatcggcgttgtactgggttataccgtaaatagcggtttcttcttattaagtggctttgttggtgccgggttactgtttgcaggaatcagcggtttttgtggaatggcaaggttgttagataagatgccgtggaaccaacgagcttgagaagcgacgccggacgcgccctagcagcgacatccggcctcagtaattagatcaggaaatcgtcgagagatttaccttctgccagcgcctgagcaattggcttcggtgtacggccctgaccggtccaggttttagtttcaccgttaacatcggtgaatttatatttcgccggacgcggctggcgttttttaccagcgcgtggtgcagcagcagagctattacccaataactcttccgggttaattccgtcagctttcatcagctccagccaggtgctaattttttcctggcgctctgccagttcacgctgctgctgttcttcttcttcacgtctttctttagtgacaaccctgaatttttcgagcatttcttcaagaacgtcaatggagaattcgcgagccatcgcacggagggtgcgaatgttatttaaactttgtaacattacggacataataaagaaaaccttttaacgccaaaacaaaaaaagtatttcgtcgcgtagtgtaagcgatcacttattatatttccacaaaatttaatctatttacagtcctgcgcgagattatttcagctgttattttctgaaactctcagaataatttcaagattatatattagccattttgatgagtaatttagattattggtgaacagagcggcgctctctgctcgctaattccgcaagcctgacaaaatcaaagtgaataaaaatgcaatataacagaataaaagaaaacatccatcactggtgctttctgctgttaatgtacattgtctggcataaaaaatgctgaaaatgacccagctactacatacaccgaattctctacgcttatagcgttacctcacccccaaactttcattagtgatattaaaggtaaggccatatctaattgatttaattaaaaataaatcatatcggcatgtaaaaatccacaatgtacaaaaaacgagccgttacggaatattttatctacaaaaactgactaaataataatttttcactaattgattagtcatagccagcgatatacgctatgcgaaaatgcagatggcaatgagatccactgctttcatctccattaacatcccattacgcttttattaaggagcattagcatgttctcaccgcagtcacgcttgcgtcatgcagttgcagatacgttcgcgatggttgtttactgttctgtcgtgaacatgtgtattgaagttttcctctccggaatgagcttcgaacagtctttttattccagattggtagcgattccggtgaacatcttaattgcatggccatacggtatgtaccgtgatctgtttatgcgcgcggcacgcaaagttagcccgtcgggctggataaaaaatctggcggatatcctggcttatgtgacgttccagtcaccggtgtatgtggcgatcttgttagtggtgggcgcagactggcatcagattatggcggcggtcagttcaaacatcgttgtttcgatgttgatgggggcggtttatggctacttcctcgattattgccgccgactgtttaaagtcagccgttaccagcaggtaaaagcctgactcttcttttcgcgactggcatcgccagtcgcgtctttaactggcttcgccaaataaaccattcaaataacgttcaagcgcaacacgcgaactaaagccatgcgggataccgtaatgctcgtgtcgctcgcctgctaaatagagcggaaattgctggtaatgatcgcaagttttaatatcggaagcgggttcagccagtgtcgaactgcgttcttttaatgttggatgaattaccagagcggtacgtcccattcgcgcttcgcgattaacatagacataattttccccacggcggtaaccatacgctttctgggttaccacatcgacagtaaaaccgactttttcaagtacgcgcgccacctcgtctggtcgtaaatacatatttgatcctcgttattatcaaccgcgggcctaccttacctgattgcgcattcacaacgctttcagaaaagtccataaagccgcgatgaacctcagttaagaaaattatggtctacactgaaaattacatcgaattctaatgggggatcatatgtttaaccgaccgaaccgcaacgacgttgatgatggcgtgcaggatatccagaatgatgtcaatcaattagctgacagcctcgaatctgtattgaagtcctggggcagcgacgccaaaggggaagctgaagccgcacgcagtaaagctcaggcattgctgaaagaaaccagggcgcgaatgcatggtcgtactcgcgtccagcaagccgcgcgcgatgccgttggctgcgcggattcttttgttcgtgaaagaccctggtgtagcgtgggtacagcagctgcggtaggtatttttatcggcgcactgttaagcatgcgcaaatcgtagtgcaaaaatgataataaatacgcgtctttgaccccgaagcctgtcttcggggtttctttttgcctggtgaatcacaaaaatccccctaccccgtcacgctcatatccagggtaatttcgaccactatttgctatatattgtgtggttgaatcttttttcaactacatctagtatctctgtatcaacagagagacaacccgacgcgtatcatcgcgccgtatcttcattttaaacggaaatacgaatcatgcgcattactatttacactcgtaacgattgcgttcagtgccacgccaccaaacgggcgatggaaaaccggggctttgattttgaaatgattaatgtcgatcgcgttcctgaagcggcagaagcgttgcgtgctcagggctttcgtcagttgccggtagtgattgctggcgatcttagctggtctggtttccgtccggacatgattaaccgtctgcatccagcgccacacgcggccagtgcatgagccagctcgtctacttctccagcagctccgaaaacacgcagcgttttatcgaacgtttaggtctgcccgcggtgcgcatcccgctcaatgagcgggaacggattcaggtagacgagccttacatcctgatcgtgccctcttacggcggcggcggtacggctggcgcggtgccacgacaggtaattcgctttttaaacgacgagcacaaccgggcgttgcttcgcggcgttattgcttctggtaatcgcaactttggtgaggcgtatggccgcgccggagatgtgattgcccggaaatgcggcgtgccgtggctgtaccgttttgaactcatgggtacgcaaagcgatatcgaaaacgttcgtaaaggagtaaccgaattttggcaacgacaaccgcagaatgcctgacgcaggaaacgatggattaccacgcgctgaatgcgatgcttaacctctacgatagcgcaggtcgcattcagttcgataaagaccgccaggccgttgacgcctttattgcgacgcatgtgcgtccgaacagtgtgaccttcagtagccagcagcagcgcctgaactggctggtcaacgaaggttactatgatgaaagcgttcttaatcgctactctcgcgactttgtcattacgctgtttgcccacgcacacaccagcggttttcgtttccagacattcctcggggcatggaagttttacaccagctatacgttgaagacattcgacggtaaacgttatctggaagattttgccgatcgagtaacgatggtggcgctgacgctggcacaaggcgatgagacgctggcgttgcaactgaccgatgaaatgctgtcaggacgctttcagccagccacgccaacattcctcaactgcggtaagcagcagcgcggcgaactggtttcctgttttttgctgcgtattgaagacaatatggagtcgattggtcgggcggtaaattccgcactgcagctgtcgaaacgcggcggcggcgtagcatttttgctgtcgaatctgcgagaagcgggcgcgccaattaaacgtattgaaaatcaatcttctggcgtaattccggtgatgaaaatgctggaagacgcattttcctatgccaaccaactcggcgctcgtcagggggctggtgcagtctatttacatgctcatcatcccgatattctgcgttttctcgacacgaaacgggaaaatgccgacgaaaaaatccgcattaaaacactgtcgcttggcgtggtgatcccggatatcactttccatctggcaaaagagaatgcgcagatggcgctgttttcgccttatgacgtagagcgagtttatggcaagccgtttgccgatgtggccatcagccaacactatgacgaactggttgccgatgaacgcattcgcaaaaaatacctcaacgcccgtgatttcttccagcgactggcagaaatccagtttgagtccggctatccctacatcatgtatgaagacacggtaaaccgtgctaaccctatcgccgggcgcataaatatgagtaatctctgctcagaaattttgcaggttaacagcgcctcagagtatgacgagaatctcgactatacccgcacaggccatgatatttcctgcaatttaggttcgttgaatattgcgcacaccatggattcccccgattttgcccgcacggtagagactgccgtgcgcggtttaacggcagtatcagatatgagtcatatccgcagcgtgccgtccatcgaagccggaaatgccgcctcgcacgccatcggactggggcagatgaatttacacggctatctggcgcgagaaggcatcgcttatggttcgccggaagcactggatttcaccaatctctatttctatgccatcacctggcatgcactgcgtacctcgatgttgctggcacgcgaacgcggtgaaaccttcgccgggttcaaacagtcacgctatgccagtggtgaatattttagccaatatctgcaagggaactggcagccgaaaacggcgaaagttggcgaactgtttacccgtagcggtattacgttacctacccgtgagatgtgggcgcagctgcgcgacgacgtgatgcgctacggcatatacaaccagaatcttcaggcggtgccgccaaccggttctatctcttatatcaaccatgctacgtcgagtattcatccgattgtggcgaaagtagagatacgcaaagagggcaaaacaggacgcgtttactaccctgccccgtttatgactaacgagaatctggcgctgtatcaggacgcttacgaaattggcgcagaaaagatcatcgacacctacgcggaagcgactcgccatgtcgatcaggggctgtcgctgacgctttttttccccgataccgccaccactcgcgatatcaacaaagcgcagatttacgcctggcgcaagggtatcaaaacgctctattacatccgcctgcgtcagatggcgctggaaggcactgaaattgaaggctgcgtctcctgtgcactttaaggaatatctatgaaactctcacgtatcagcgccatcaactggaacaagatatctgacgataaagatctggaggtgtggaatcgcctgaccagcaatttctggctaccagaaaaggtgccgctgtcgaacgatattcctgcctggcagacattaactgtcgtagaacaacaactgacgatgcgcgtttttactggcctgacgctgctcgacacgctgcaaaatgttatcggcgcgccttctctgatgcccgatgcactcacgcctcatgaagaagcggtattatcgaatatcagctttatggaagcggttcatgcccgctcttacagttcgattttctcgacgctatgccagaccaaagatgtcgatgccgcctacgcctggagtgaagaaaacgcaccgttgcagcgaaaagctcagattattcagcaacattatcgcggtgatgatccgctgaaaaagaaaatcgccagtgtgtttcttgaatcttttttgttctattccggtttctggctgccgatgtatttttccagccgcggaaagctgaccaataccgcggacctgatccgtctgattatccgcgatgaagcagtccacggttactacataggctataaatatcagaaaaacatggaaaagatatctctgggacaacgtgaagagttgaagagtttcgccttcgatttgttgctggaactctacgacaacgagttgcaatacaccgatgagctgtacgccgaaaccccgtgggctgacgatgtgaaagcgtttctctgttacaacgccaataaggctttgatgaatctgggctacgaaccgttatttcccgcagaaatggcggaagtgaatccggcaatcctcgccgcgctttcgccgaatgccgatgaaaatcacgatttcttttccggttcaggctcctcttatgtgatggggaaagcggttgaaacagaagatgaagactggaatttctgagggtgttattttcaaaaatatcactacccgcagcagggaaataattcccgccaaatagctttttatcacgcaaataatttgtggtgatctacactgatactctgttgcattattcgcctgaaaccacaatattcaggcgtttttttcgctatctttgacaaaaaatatcaactttctcgatttgctctcagcccttatatcacgggaaattccggcgatttgctcgcatcaatattcatgccacatttgccatcaggggttgcctcagattctcagtatgttagggtagaaaaaagtgactatttccattgggtaatatatcgacatagacaaataaaggaatctttctattgcatggcaattaaattagaaattaaaaatctttataaaatatttggcgagcatccacagcgagcgttcaaatatatcgaacaaggactttcaaaagaacaaattctggaaaaaactgggctatcgcttggcgtaaaagacgccagtctggccattgaagaaggcgagatatttgtcatcatgggattatccggctcgggtaaatccacaatggtacgccttctcaatcgcctgattgaacccacccgcgggcaagtgctgattgatggtgtggatattgccaaaatatccgacgccgaactccgtgaggtgcgcagaaaaaagattgcgatggtcttccagtcctttgccttaatgccgcatatgaccgtgctggacaatactgcgttcggtatggaattggccggaattaatgccgaagaacgccgggaaaaagcccttgatgcactgcgtcaggtcgggctggaaaattatgcccacagctacccggatgaactctctggcgggatgcgtcaacgtgtgggattagcccgcgcgttagcgattaatccggatatattattaatggacgaagccttctcggcgctcgatccattaattcgcaccgagatgcaggatgagctggtaaaattacaggcgaaacatcagcgcaccattgtctttatttcccacgatcttgatgaagccatgcgtattggcgaccgaattgccattatgcaaaatggtgaagtggtacaggtcggcacaccggatgaaattctcaataatccggcgaatgattatgtccgtaccttcttccgtggcgttgatattagtcaggtattcagtgcgaaagatattgcccgccggacaccgaatggcttaattcgtaaaacccctggcttcggcccacgttcggcactgaaattattgcaggatgaagatcgcgaatatggctacgttatcgaacgcggtaataagtttgtcggcgcagtctccatcgattcgcttaaaaccgcgttaacgcagcagcaaggtcttgatgcggcgctgattgatgcgccgttagcagtcgatgcacaaacgcctcttagcgagttgctctctcatgtcggacaggcaccctgtgcggtgcccgtggtcgacgaggaccaacagtatgtcggcatcatttcgaaaggaatgctgctgcgcgctttagatcgtgagggggtaaataatggctgatcaaaataatccgtgggataccacgccagcggcggacagtgccgcgcaatccgcagacgcctggggtacaccgacgactgcaccgactgacggcggtggtgctgactggctgaccagtacgcctgcgccaaacgtcgagcattttaatattctcgatccgttccataaaacgctgatcccgctcgacagttgggtcactgaagggatcgactgggtcgttacccatttccgtcccgtcttccagggcgtgcgcgttccggttgattatatcctcaacggtttccagcaattgctgctgggtatgcccgcaccggtggcgattatcgttttcgctctcatcgcctggcagatttccggggtcggaatgggtgtggcgacgctggtttcgctgattgccatcggcgcaatcggtgcctggtcgcaggcaatggtgactctggcgctggtgttaaccgccctgctgttctgtatcgtcatcggtttgccgttggggatatggctggcgagaagtccgcgagcggcgaaaattattcgtccactgcttgatgccatgcagaccacgccagcgtttgtttatctggtgccaatcgtcatgctatttggtatcggtaacgtgccgggcgtggtggtgacgatcatctttgctctgccgccgattatccgtctgaccattctggggattaaccaggttccggcggatctgattgaagcctcgcgctcattcggtgccagcccgcgccagatgctgttcaaagttcagttaccgctggcgatgccgaccattatggcgggcgttaaccagacgctgatgctggccctttctatggtggtcatcgcctcgatgattgccgtcggcgggttgggtcagatggtacttcgcggtatcggtcgtctggatatggggcttgccaccgttggcggcgtcgggattgtgatcctcgccattatcctcgatcgtctgacgcaggccgttgggcgcgactcacgcagtcgcggcaaccgtcgctggtacaccactggccctgttggtctgctgacccgcccattcattaagtaactctgcacttgcccggtgacgccgggcattatcaccctgccaaaaaaaggaataacaatgcgacatagcgtactttttgcgacagcgtttgccacgcttatctctacacaaacttttgctgccgatctgccgggcaaaggcattactgttaatccagttcagagcaccatcactgaagaaaccttccagacgctgctggtcagtcgtgcgctggagaaattaggttataccgtcaacaaacccagcgaagtagattacaacgttggctacacctcgcttgcttccggcgatgcaaccttcaccgccgtgaactggacgccactgcatgacaacatgtacgaagctgccggtggcgataagaaattttatcgtgaaggggtatttgttaacggcgcggcacagggttacctgatcgataagaaaaccgccgaccagtacaaaatcaccaacatcgcacaactgaaagatccgaagatcgccaaactgttcgataccaacggcgacggaaaagcggatttaaccggttgtaaccctggctggggctgcgaaggtgcgatcaaccaccagcttgccgcgtatgaactgacccataccgtgacgcataatcaggggaactacgcggcgatgatggccgacaccatcagtcgctacaaagagggcaaaccggtgttttactacacctggacgccgtactgggtgagtaatgagctgaagccagggaaagatgtggtctggttgcaggtgccgttctccgcactgccgggcgataaaaacgccgataccaaactgccgaatggtgcgaattatggcttcccggtcagcaccatgcatatcgttgccaacaaagcctgggccgagaaaaacccggcagcagcgaaactgtttgccattatgcagttgccagtggcagatattaacgcccagaacgccattatgcatgacggcaaagcctcagaaggcgatattcagggccatgttgatggctggatcaaagcccaccagcagcagttcgatggctgggtgaatgaggcgctggcagcgcagaagtaatttttattcgggcggataaggcgtttttacctcatccgccgctctgtacacaatgcctgatgcgacgctggagcgtcttatcatgcctacaaaatacactcattccgtatggcggataaggcgttttcgccgcatccgtcgttctgtgcacaatgcctgatgcgacgctggcgcgtcttatcatgcctacaaaccacatcgcacatttcaacaagctatctttcatcccatattcatcaacatccgctattattgatttccagcttaatcatcacctgatgaacaaaaataatgactaaacctaatcatgagcttagcccggcgctgatcgtgctgatgtctatcgccaccggtctggcggtcgccagtaactattacgctcagccattgctcgacaccatcgcgcgtaacttttccctttccgccagttcggcaggctttattgttaccgccgcgcaattgggctatgcagcaggtctgctgtttcttgttcccctcggtgatatgtttgaacgccgccgcctgattgtctcgatgaccttactggcggcaggcggcatgttaatcactgccagcagtcagtcgctggcgatgatgatcctcggtacggcattaaccggtttattctctgtcgtggcacaaattctggttccgctggcagcgacgctggcttcaccggacaaacgcggcaaagtggttggcactattatgagcggtctgctgttggggatcttgctggcacggacagttgccggattgctggcgaatctcggcggctggcgcaccgtcttttgggttgcttcggtgttaatggcactgatggcgctggcattatggcgtggtctgccacaaatgaaatcagaaacccacctcaactacccacagttgttgggttccgttttcagtatgtttatcagcgataaaattctgcgtacccgcgcgttgctgggctgcctgacctttgccaatttcagcattctctggacctcaatggcctttttgcttgccgctccaccttttaactacagcgatggtgtaattggtctgtttggacttgcgggagctgccggagcgttgggcgctcgtccggcgggcggttttgccgataagggcaaatcgcaccacaccacaactttcggtctgctgctgctattactttcatggctggcgatctggtttggtcacacttccgtactggcgttgattatcggaatcctggtgctggatctcaccgtgcagggcgtgcatatcactaaccagacggtaatttatcggatacatcctgatgcgcgcaatcgcctgaccgcaggttacatgactagctactttattggcggtgccgccggttcgctaatttcagcctcagcctggcaacatggcggttgggctggcgtttgtctggctggcgcgacgattgccctggttaacttactggtctggtggcgaggttttcatcgtcaggaagccgcaaattaagcaatcagcaaccgttttcgtggctttacacttataagggtgttaagaagcccatcagtctgataaggttaagatattcattcagtctatttataatattaacaatcgttaagcgtacactctatggaaagccctactccacagcctgctcctggttcggcgaccttcatggaaggatgcaaagacagtttaccgattgttattagttatattccggtggcctttgcgttcggtctgaatgcgacccgtctgggattctctcctctcgaaagcgtttttttctcctgcatcatttatgcaggcgcgagccagttcgtcattaccgcgatgctggcagccgggagtagtttgtggattgctgcactgaccgtcatggcaatggatgttcgccatgtgttgtatggcccgtcactgcgtagccgtattattcagcgtctgcaaaaatcgaaaaccgccctgtgggcgtttggcctgacggatgaggtttttgccgccgcaaccgcaaaactggtacgcaataatcgccgctggagcgagaactggatgatcggcattgccttcagttcatggtcatcgtgggtatttggtacggtaataggggcattctccggcagcggcttgctgcaaggttatcccgccgttgaagctgcattaggttttatgcttccggcactctttatgagtttcctgctcgcctctttccagcgcaaacaatctctttgcgttaccgcagcgttagttggtgcccttgcaggcgtaacgctattttctattcccgtcgccattctggcaggcattgtctgtggctgcctcactgcgttaatccaggcattctggcaaggagcgcccgatgagctatgaggttctgctgcttgggttactggttggcgtggcgaattattgcttccgctatttgccgctgcgcctgcgtgtgggtaatgcccgcccaaccaaacgtggcgcggtaggtattttgctcgacaccattggcatcgcctcgatatgcgctctgctggttgtctctaccgcaccagaagtgatgcacgatacacgccgtttcgtgcccacgctggtcggcttcgcggtactgggtgccagtttctataaaacacgcagcattatcatcccaacactgcttagtgcgctggcctatgggctcgcctggaaagtgatggcgattatataacccacaagaatcatttttctaaaacaatacatttactttatttgtcactgtcgttactatatcgactgaaattaatgaggtcatacccaaatggatagttcgtttacgcccattgaacaaatgctaaaatttcgcgccagccgccacgaagattttccttatcaggagatccttctgactcgtctttgcatgcacatgcaaagcaagctgctggagaaccgcaataaaatgctgaaggctcaggggattaacgagacgttgtttatggcgttgattacgctggagtctcaggaaaaccacagtattcagccttctgaattaagttgtgctcttggatcatcccgtaccaacgcgacgcgtattgccgatgaactggaaaaacgcggttggatcgaacgtcgtgaaagcgataacgatcgccgctgcctgcatctgcaattaacggaaaaaggtcacgagtttttgcgcgaggttttaccaccgcagcataactgcctgcatcaactctggtccgcgctcagcacaacagaaaaagatcagctcgagcaaatcacccgcaaattgctctcccgtctcgaccagatggaacaagacggtgtggttctcgaagcgatgagctaacgcgtcatctcgctcaaaaatccagatttataaaagaaaaaatgaccggccagcatcgcaacatgctggcctttttggcaagcaggtcggctcagccgatgagttaagaagatcgtggagaacaatatgagcgcaaatgcggagactcaaaccccgcagcaaccggtaaagaagagcggcaaacgtaagcgtctgctcctccttctcaccttgctctttataattattgccgtagcgatagggatttattggtttttggtactgcgtcatttcgaagaaaccgatgacgcatacgtggcagggaatcagattcaaattatgtctcaggtgtctggcagcgtgacgaaagtctgggccgataacaccgattttgtaaaagaaggcgatgttctggtcactctcgacccgacagatgctcgccaggcgtttgaaaaagccaaaactgcactggcttccagcgttcgccaaacccaccagctgatgattaacagcaaacagttgcaggcgaatattgaggtgcaaaaaatcgccctcgcgaaagcacaaagcgactacaaccgccgtgtgccgctgggcaatgccaacctgattggtcgcgaagagctgcaacacgcccgcgacgccgtcaccagtgcccaggcgcaactggacgtcgcgattcaacaatacaatgccaatcaggcgatgattctggggactaaactggaagatcagccagccgtgcaacaggctgccaccgaagtacgtaacgcctggctggcgctggagcgtactcgtattgtcagtccgatgaccggttatgtctcccgccgcgcggtacagcctggggcgcaaattagcccaacgacgccgctgatggcggtcgttccagccaccaatatgtgggtggatgccaactttaaagagacgcagattgccaatatgcgtatcggtcagccggtcactatcaccacggatatttacggcgatgatgtgaaatacaccggtaaagtggttggtctggatatgggcacaggtagcgcgttctcactgcttccagcgcaaaatgcgaccggtaactggatcaaagtcgttcagcgtctgcctgtgcgtatcgaactggaccagaaacagctggagcaatatccgctgcgtatcggtttgtccacgctggtgagcgtcaataccactaaccgtgacggtcaggtactggcaaataaagtacgttccactccggtagcggtaagcaccgcgcgtgaaatcagcctggcacctgtcaataaactgatcgacgatatcgtaaaagctaacgctggctaatccagaggtgcgtgtgatgcaacagcaaaaaccgctggaaggcgcgcaactggtcattatgacgattgcgctgtcactggcgacattcatgcaggtgctggactccaccattgctaacgtggcgatccccactatcgccgggaatctgggctcatcgctcagccagggaacgtgggtaatcacttctttcggggtggcgaatgccatctcgatcccgcttaccggctggctggcaaagcgcgtcggggaagtgaaactgttcctttggtccaccatcgcctttgctattgcgtcgtgggcgtgtggtgtctccagcagcctgaatatgctgatcttcttccgcgtgattcaggggattgtcgccgggccgttgatcccgctttcgcaaagtctattgctgaataactacccgccagccaaacgctcgatcgcgctggcgttgtggtcgatgacggtgattgtcgcgccaatttgcggcccgatcctcggcggttatatcagcgataattaccactggggctggatattcttcatcaacgtgccgattggcgtggcggtggtgttgatgacactgcaaactctgcgcggacgtgaaacccgcaccgaacggcggcggattgatgccgtggggctggcactgctggttattggtatcggcagcctgcagattatgctcgaccgcggtaaagagctggactggttttcatcacaggaaattatcatccttaccgtggtggcggtggtggctatctgcttcctgattgtctgggagctgaccgacgataacccgatagtcgatctgtcgttgtttaagtcgcgcaacttcaccatcggctgcttgtgtatcagcctcgcgtatatgctctacttcggcgctattgttctgctgccgcagttgttgcaggaggtctacggttacacggcaacgtgggcaggtctggcctctgcgccggtagggattattccggtgatcctgtcgccgattatcggccgcttcgcgcataaactggatatgcggcggctggtaaccttcagctttattatgtatgccgtctgcttctactggcgtgcctatacctttgaaccaggtatggattttggcgcgtcggcctggccgcagtttatccaggggtttgcggtggcctgcttctttatgccgctgaccaccattacgctgtctggtttgccaccggaacgactggcggcggcatcgagcctctctaactttacgcgaacgctggcggggtctatcggcacgtcgataaccacgaccatgtggaccaaccgcgagtcgatgcaccatgcgcagttgactgagtcggtaaacccgttcaacccgaatgcccaggcgatgtacagtcaactggaagggcttgggatgacgcaacagcaggcatcaggctggattgcccagcagatcaccaatcaggggctgattatttccgccaatgagatcttctggatgtcagccgggatattcctcgtcctgctggggctggtgtggtttgctaaaccgccatttggcgcaggtggcggcggaggcggtgcgcactaagtacaactaagccagttcatttgaactggcttttttcaattaattgtgaagatagtttactgactagatgtgcagttcctgcaacttctctttcggcagtgccagttcttcgttgctgttgatgcgtacatcacgttccagaatgctacgcgcaatatcctgcgcttcctgcaacgagtgcatctggtaagtgccacactggtagacgttcagttccgggatctgattctgatcctgcactttcagcacgtcttccattgccgctttccaggcatcagcaacacgctgctcatctggcgtaccaatcagactcatataaaaaccggtgcggcagcccattggcgagatatcgataatctctacaccattaccgttaagatggttacgcataaaaccagcaaacaggtgctccagggtatggatccctctttctggcatcacttctttgttcggcacgcagaagcgcagatcgaacacggtgattgcgtcgccatgcggggtgttcattgttttcgccacccgaactgcaggcgcttccatccgggtatgatcgactgtgaagctatctaacaacggcatttagccacctccggtaatttttttaaaaattttctgaactctttcttcccaggcgagtctgagtatatgaaagacgcgcatttgttatcatcatccctgaattcagagatgaaattttggccactcacgagtggcctttttcttttctgtcaggcgtgtttttccagccacaccgcaaacggttcggtatcagcggcttccatttcctgctgacggcgttcagacgcctcgcgctcggctacaaaatcctcttcgcgcagaatttccagcggctcttcacgcagcagattacggtaggcttctgcaaatgctttgcctgttccgccaataccagtatcaatcatagaccttaagatacgggcagagaaagtcagatcgggattatcgaagcaggcaaccagttcatcacacactttctgatacgcttcgccgccgttaatactatccagcgtttgcgcgacgcgtttcagatcgcggaacagatctttacccacctgcggtaacgggaactgtgcggtttcgcagccgatacccagcgtcagacccggtttgcgaccttcgaggatcacccggttccagttaacgcgtgtacaggcaagttcgctactgctcatttccggtgcatcagccagcgcacaccagaccataaacaggtcgaggaatcgcacctgctgttcatctacaccaatcggcgagaacgggttgatgtccagcgaacgcacttcaatatattcaatgccgccacgtaacagcgcatcagaaggcgactcgccgctgcgggtaacgcgttttggacgaatcggcgcgtacagttcgttttcaatctgcaacacgttgctgttgatttgcagcctcttaccgtctttctcaataccaatcttcgcgtactcttccgatggcgttttgattgcctgtttaaggcccgctacgtactcgtaaagatcgttgaaggtaataccaagattgctttgcgatttattggtatagccgagatcgctcaaacgaagagaggtcgcatacggcaggtaatacataccgcactcggttttctcaaacggcagcgacgttggttttccttgcaggaaagaagaacaaatcgccggagatgcaccaaacagataaggaatgacccaaccgaaacgatagtaattgcggataacgcggaaatagcccgcagaaattttctctttggcatcagcgcccgagatatcaccgcacttcgcttgccagaatgccattggcaaagagaaattgtagtgcacgccggaaatggtttgcatcagcgcgccgtagcgatttttcagcccttcacgatacagcgttttaaagcgtccggtgttagaagtgccgtactgtgccagttcgatgtcctgaccttctgcgatgtagcatggcatacttaacggccacatccgctcatcgcccatattgcgcgccgtataacgatgcagatcgcgcataaaggtcagcatatgttcaatatcaccatccactggtgtaatgaattccagcaatgcttccgcaaaatcggtagtaatccatttgtgcgtcagtgcggaacctaatgcttcaggatgacctgttgttgccagtgtgccatcagcattaacacgcaaagtttcgcgctccagcccacgctgtatcccctttaacgcctgaggatgtttttccagccaggccagcgcctgtgatacgtccgggatcaaattgacctcccgcctgtcaaaatcgttttaattagcataactgtaatggtgaccatatgtgcaggcctacaattagtgccaccacatcatgccctgaacggtcgctgctgcaactgcaacatagcgtaacgctttaccaaggcacaaaaaaagattaccggtccccacgagatgcgcatccatcccgctaacagacacagtaaatcgccaaccacgggcatccagcttaataatagcgtgactgcaccatagcgtttcagccagccggtagctttctcttgccagcgcgatgttttacgcaatggaaagaaacgcccaaggataacgttagttaaccctccaaggctattacccattgttgctgttaaaactaaaacccagggatgactgatcccggaaagcaacattgccaccagcacgacttcggagttgccgggtaatagtgtagcgctgagaaaactactggcaaacaacgagaaaagcgataacgcttcactcacagcaagcgaacatccacggcgtccatgcctgctgcacgggccgcctgaataccgaaatcggcatcttcaaagaccacacactgcgtcggttgcacgcccatacgctgcgcgcacaacaaaaatgtgtctggcgcgggtttatggtgtttgacgtgatcggcagcgacgacggcgtcaaaataatggcgtaatcccaggtgcgccagcaatgcctcagcgatggcgctttcactccccgttcctacagccattgggcgacgaccatgccaacttttcaccacatcaacaagaggaagcggttcgacgctatccagcagcatacttcttactgcttctgttttttcacgcgctaacgcatgcgggtcgagatcggcctgattcagctcaataattgcctgagcaatacgccaggtgggcgatccattaagcgcaatcatcgcctgaatatcgtactgaagaccgtagtgccctaatacttcgcgccacgctttacggtgcgtaggctccgtatccaggattgtgccatccatatcaaaaattaaacctgcataacgctcgtacatggtcttctcgcaagtcgaaaaatatgacgctactttagcgtaattgcttgattttgtcgctgatggcgaaggagaagaaaattcaggaaatggataaaggagttatttagaaatgaaatatttttgaaggaaattttttggagaagatggtgcatccgggaggatgactcactgacgttcgcccttcgggccgttgctggcgcaacgttatccttcctggtgcctgcggttaataccgctatctcttcgataccttcattgctgaaggttacggagaatatggtgcatccgggaggattcgaacctccgaccgctcggttcgtagccgagtactctatccagctgagctacggatgcatcgggaaaacttattctactgctgatattgataccgctactaaagccatatcaattaagagatggtgcatccgggaggattactcgccttgcggctcgcccttcgggccgttgctaaagcaacgttatcatccctagtgcctgcggttaattccgctacctcttcgataccttcattgctgaagatttcggagaatatggtgcatccgggaggattcgaacctccgaccgctcggttcgtagccgagtactctatccagctgagctacggatgcatcgggaaatttattttactgctgatattgataccgctactaaagccatatcaagtaagagatggtgcatccgggaggattcgaacctccgaccgctcggttcgtagccgagtactctatccagctgagctacggatgcatcgggaaacttactttactgcagattttttgataccgctactaaagccgtatcaagtaagagatggtgcatccgggaggattactcgccttgcggctcgcccttcgggccgttgctaaagcaacgttatcctccctggtgcctgcggttattaccgccacctcttccataccttcatcgctgaaagtacgtagaatatggtgcatccgggaggattcgaacctccgaccgctcggttcgtagccgagtactctatccagctgagctacggatgcaaatggcggtgaggcggggattcgaaccccggatgcagcttttgaccgcatactcccttagcaggggagcgccttcagcctctcggccacctcaccacacgcctcttacgagtgcttcgaagaacttgtttattgctcatcgtcgctgcgtggcgcacatattactttctgagacttataagtcaaacaatttttcccacacttttatcgtttgcacacttcacgctcaattagtctgtaaaaacgtcaaaaagagtgttttatctacagaaaaacggaggtctggcagatagcagtaatgcaaaaaaatggagacttaagttgaatgaacgggagtaaagcgaaaagactatagagtgaaggagaaattttgagggtgcgtctcaccgataaagatgagacgcggaaagattagtaactggactgctgggatttttcagcctggatacgctggtagatctcttcacggtgaacagaaacttccttcggggcatttacgccaatacgtacctggttgccctttacccctaaaactgtcacggtgacctcatccccaatcatgagggtttcaccaactcgacgagtcagaatcagcattctttgctccttgaaagattaaaagagtcgggtctctctgtatcccggcattatccatcatataacgccaaaaagtaagcaatgacaaacacattacatgtaagcagtcatggcattacattctgttaaacctaagtttagccgatatacacaacttcaacctgactttatcgttgtcgatagcgttaatgcgaatgccgtgaagcgagtccacggcattgcctgacgcttatattattgcaatttcgcgctgacccagcctttcacactggctaacgctgcaggtaaggccgcagcatccgtaccaccggcttgcgccatgtcaggacgtccaccacccttgccgcccacctgctgagcgaccataccaatcagttcccctgctttcacacgatctgtgacgtccttagatacgcctgcaatcagagaaaccttaccttcggctaccgttgccagcacgataattgtcgaccccagctgattttttaaatcgtcaaccatggtacgcaacattttcggctcaacaccgctaagctcgctaaccaacagcttaacaccattaacatcaattgccttactggaaagatttgcactctcctgtgcggcagcttgttctttaagctgttgtaactctttttccagctgacgcgtacgttccagtactgaacgcactttatcagccagattattgctatcgcctttcagcagatgtgcgacttcgcttaagcgatcgctgtctgcatgaacggtggcgatagcgccttctccggttaccgcttcgatacgacgaacgcctgcagcagtacccgattcagagatgatgcggaacagaccaatatcaccagtgcggctggcgtgagtaccgccacacagctcggtggagaaatcgcccatgctcagcacgcgtacgcgctcatcatacttctcgccgaacagcgccatcgcacctttcgctttcgccgcttcgagatccatgatgttggtttcgataggcaaattgcgacgaatctgtgcgttcaccaggtcttcgaccgcacgaatctcttccggtttcatcgcttcgttgtgtgagaagtcgaagcgcagcactttgtcgttaaccagtgaacctttctgcgatacatgagtacccagaacctggcgcagcgcagcgtgcatcaggtgcgttgcggagtgattcagacgaatacgggcgcgacgagcctcatcaacatcagcctgcacagcgtcgcccactttcagagaacccgcagcaagtttaccgatgtgaccaatcgcctggccgtatttctgcgtatcttccaccgcaaaggagaagttagcgcctttcagttcgcctttatcgccaacctgaccgccggattccgcatagaatggcgtttgatccagcacgaccacagcttcctggcctgcattgatggcatcaaccgctttaccatcaacaaacagcgcagtcactttgccgttcagttccagatggtcatagcctttaaattcagatgcactgtcaacacggatcattgcgttgtaatcggcaccaaagccgctggcttcgcgcgcgcgacgacgctgctcttccattgcagcttcaaaaccagcttcgtcaactttgatgttgcgctcacgacaaacatcagccgtcaggtcaaccgggaagccataggtgtcgtacagacggaaagcagtttcaccatccagcgtatcaccagaaagttttgccagctcttcatccagcaacgccagaccgcgctccagagtacgagcaaactgctcttcttcagtcttcagcacctgctcaacctgcgcctgctggcgtttcaggtcttcacccgcagagcccataacgtcgatcagcggaccaaccagtttgtagaagaaggtttctttcgcgccgagcatattaccgtgacgcactgcgcgacgaatgatacgacgcagtacataaccacggttttcattggacggcattacgccatccgcgatcaggaacgcacaagaacgaatgtggtcagcgattacgcgcagcgatttattgctcagatcggttgcgccagtgactttcgctaccgcctggatcagcgtgcggaacaggtcgatgtcatagttagagttaacgtgttgcagcaccgcagcaatacgctccagacccataccggtatctacagacggcttcggcagcggttccatcgtgccatcggcctggcggttgaactgcatgaagacgatgttccagatctcaatgtagcggtcgccgtcttcttccgggcttcccggagggcccccccaaatgtggtcgccgtgatcgtagaagatttcggtgcacgggccgcacggaccagtgtcacccatctgccagaagttgtcagatgcgtatggcgcacctttgttatcgccgatgcgaataatacgttcgcgcgggatccctacttctttttcccagatttcgtaggcttcgtcgtcgctttcatagacggtaacccacagacgctctttcggcagggcaaaccatttttcgctggtcagcagttcccatgcaaactgaatggcatcgtgtttgaaatagtcgccgaagctgaagttgcccagcatttcgaagaaggtatggtgacgcgcggtgtaaccgacgttttccaggtcgttgtgtttaccacccgcacgcacgcagcgttgggaagtggtagcgcgggaataattacgcttgtcgagcccaaggaacacatccttgaactggttcatcccggcgttggtaaacaacaaagttgggtcgttatggggtaccagggagctgctggcaactacctgatgtcccttactatggaaaaagtcgagaaacgcctgacggatctcagcggtgctcttgctcataattatcctgaaatcaagctaacgaaatatcgccaccagctccagcgtgtcttaaccgccgggctggtaactgaaaagtgggaataagataagttttcttgactgggaagtaaaataccgtatgcgttcagtcggcaaaatttcgccaaatctcctggatatcttccatcagatagccacgatagagcagaaaacgctggatcttaactttttctgaaaagacagttggcaaaggttcgccatattttcgcgtcgcctgatcgcgcgccagtgcgcaccagtcgatgtcacattcacgcatcgctttttctgtcgcttcgcgggaaatacctttctgattcagttcctggcgaatacgcgcaggtccataacctttgcggctacggctggcgataaagcgcgcaacaaatcggctgtcatcgagatagccatgttcatggcaccaggcaataacgcgctcgtaatcttctgccgtagcatcaatctcttctgggccatttttgcccataatcggtgccgcgagtttacgtcgcagttcttgctcactgtgatcgcgcaccgccagaatgcgtaccgcacgatccaacaggcgagcatatgccgggcgacgggatgttgattctgtcatggcatatccttacaacttaaaaaaacaaaagggccgcagatgcgacccttgtgtatcaaacaagacgattaaaaatcttcgttagtttctgctacgccttcgctatcatctacagagaaatccggcgttgagttcgggttgctcagcagcaactcacgtactttcttctcgatctctttcgcggtttccgggttatctttcagccaggcagtcgcattcgctttaccctgaccgatcttctcacctttgtagctgtaccacgcgcctgctttctcgatcagcttctcttttacgcccaggtcaaccagttcgccgtagaagttgataccttcgccgtagaggatctggaattcagcctgtttaaacggcgcagcgattttgttcttcaccactttcacgcgggtttcgctacccaccacgttttcgccctctttcaccgcgccgatacgacggatgtcgagacgaacagaggcgtagaatttcagcgcgttaccaccggtagtggtttccgggttaccgaacatcacaccaattttcatacggatctggttgatgaagatcagcagcgtgttggactgcttcaggttacccgccagcttacgcatcgcctggctcatcatacgtgccgcaaggcccatgtgagagtcgccgatttcgccttcgatttccgctttcggcgtcagtgccgccacggagtcaacgacgataacgtctactgcgccagaacgcgccagggcgtcacagatttccagtgcctgctcgccggtgtccggctgggagcacagcaggttgtcgatatcgacgcccagtttacgtgcgtagattgggtccagcgcgtgttcagcatcgataaacgcacaggttttaccttcacgctgcgctgcggcgatcacctgcagcgtcagcgtggttttaccggaagattccggtccgtagatttcgacgatacggcccatcggcagaccacctgccccaagcgcgatatccagtgaaagcgaaccggtagagatggtttccacatccatggaacggtcttcacccaggcgcatgatggagcctttaccaaattgtttctcaatctggcccagtgctgccgccaacgctttctgtttgttttcgtcgatagccatttttactcctgtcatgccgggtaataccggatagtcaatatgttctgttgaagcaattatactgtatgctcatacagtatcaagtgttttgtagaaattgttgccacaaggtctgcaatgcatacgcagtagcctgacgacgcaccgcatcacggtcgccgctgaagcattcccgccgggtaatgccttcaccgcgggcagtggcaaaagcaaaccagacggtgccgacaggcttctcttcactgccgccatccggcccggcgataccactaatagacacggcataatcagcacgagccgctttcagtgcgcctatcgccatttccaccacgacgggttcactcaccgcgccatgctgcgccagcgtctcttcgcgtacgccgatcatctgcgctttggcttcgttactgtaggtgacaaatccgcgttcaaaccaggcggagctaccggcaatatcggtaatcactttcgctacccaaccaccggtacaagactcggcagttgttacggttgcgccacgggctttcagcgcctgcccaacctgttcacttaactgcatcagttcactgtcagtcatcacaacctctgtcagtcaaaaatttatgccggacaagatagcactttcgtcaggaagatggtgttggcgttgcaattttacgaggaggattcagaaaaaagctgattagccagagggaagctcacgcccccctcttgtaaatagctactgtactcgcgccagcgccacggcttgtcctaactgccagaccgccattgcgtaatgggtgctgtggttgtaacgggtgatggtgtagaagttcggcagaccgtaccagtactggtagccggtgccaacatccagacgcagcaggctggcttgttgatggttgcccagcggctgctgtggcgttaaacctgcggcggcaagctgcgaaatgctgtacttagttttgaagccatttggcaagcctggagcctgaccgtttgccattaccgcgacctgatcgcctttcacccagccgtgcgctttgaaatagttcgccacgctaccgatcgcatcaaccggatcccacaggttgatatgcccgtcgccgctgaaatctaccgcatattgtttgtaagacgacggcataaactgtccgtagcccatcgccccggcaaaggaacctttcagattgagcggatcgtcctgctcgtcgcgcgccatcaacaggaaggtttccagctcgccagagaaatactccgcgcggcgtgggtagttaaatgacagcgttgccagcgcatcgaggatgcgagttttccccatcacgcgcccccagcgggtttcaacgccgataatcccgacgataatttccggcggtactccatacacctgccacgcgcgattcaacgcatcttcatactgattccagaaaaccacaccgttctgcacgttgtccggcgtaataaattttttgcgataacggagccatgcgccgttcggacctgatggcggtttcaccgatgtggttggtgcctggttatccatcagccgcagtaccgaatccagacgcttcgcctgggagagaatttcctgcaactgctgacgatcgaaaccgtgtttgttcaccattttgtcgatgaactgctgggcattcgggttattagcgaaatcgccgcccatctgcatcacattgtgctgcggctcaagcaggaagccgccagacggcgttccggtggtcgtatcagtctcagtaggttttggcttgctgctacaggcggcaagcaacacaaaaaggggaagcaatgttacataacgacgcttgaacatgaggggtccatttaacagattcaaccaggggcaagtatggtaaagcatcacgccccgcacaaggaagcggtagtcactgcccgatacggactttacataactcaactcattcccctcgctatccttttattcaaactttcaaattaaaatatttatctttcattttgcgatcaaaataacacttttaaatctttcaatctgattagattaggttgccgtttggtaataaaacaataaatcctgaaggagagaacaatgatagaaaccattactcatggtgcagagtggtttatcgggctgttccaaaagggcggagaggtgtttaccgggatggtgaccggcattcttccgctgttgattagcctgctggttatcatgaacgcactgattaattttatcggtcagcatcgtattgaacgttttgctcaacgttgcgccggtaaccctgtttcccgttacctactgttaccgtgcattggcacgtttgtcttttgcaatccgatgaccctaagcctgggtcgctttatgccggaaaagtacaaacccagctactacgcggcggcctcttatagctgccactcaatgaatggcctcttcccccatatcaaccctggcgaactgtttgtttatcttggcattgccagcggtctgacaacgctgaacctgccacttggcccactggcggtgagttatctgctggttggtctggtcaccaatttcttccgcggctgggtgaccgatctgaccaccgccatttttgagaaaaagatgggcattcaacttgaacaaaaagttcacctggcaggagcaacatcatgacgcatattcggatcgaaaaaggaacgggtggctggggcggcccgcttgagctgaaagccacgccgggaaaaaaaatcgtctatatcaccgccggtacccggcctgcgattgttgacaaactggcacagcttactggctggcaggctattgacggatttaaagaaggtgaacccgcggaggcggaaattggtgtcgcggtaatcgactgtggcggcacattacgctgcggcatctatccggaacgacgtattcccaccattaatatccactcgacgggcaagtccggtccgctggcgcagtacattgtggaagatatttatgtctctggcgtaaaagaagaaaacatcactgtagtaggtgatgcgacaccacaaccctcttccgtgggccgtgactatgacaccagtaagaaaatcaccgaacaaagcgatggtttactggcgaaggtgggaatgggcatggggtccaccgttgcggtgctgtttcaatctggtcgtgacaccatcgacactgtattaaaaaccattctgccgtttatggcattcgtctcggcgctcattggcatcattatggcttctggccttggtgactggattgcccacggtcttgctccgctggcgagccatccactgggtctggtcatgctggcgctcatctgttccttcccactgctttcacctttcctcggcccaggcgcagttatcgcacaggttatcggcgtattgattggcgtgcagattggtctcggcaatattccgccgcatctggctttaccggcactgtttgccatcaacgcgcaggcggcctgcgacttcatcccggtcggtttgtcgctggcggaagcccgtcaggacacggttcgcgtcggtgtcccttctgtactggtgagccgctttttaaccggcgcgccgactgtactgatcgcctggtttgtctccggttttatctatcaatagaggctgaaacatgaccgttatttatcagaccaccatcacccgtatcggcgcgagtgccattgacgccctcagtgaccagatgctcatcacctttcgtgaaggcgcgcctgcggacctcgaagagtattgcttcattcattgccacggcgagttgaaaggtgcactccatcccggtttgcaattttcactcgggcagcatcgctatccggtgaccgctgttggcagcgtggcggaagacaaccttcgcgaactgggtcatgtcaccctgcgcttcgatggtttaaacgaagcggaatttccgggcactgtccatgtggcaggccctgtccccgacgatatcgcgccgggatcggttttgaagtttgaatctgttaaggagtaaaaaatgaatcaggttgccgttgtcatcggtggtgggcaaaccttaggcgcgttcctgtgccacggtctggctgccgaggggtatcgcgtcgcggttgtcgatattcagagcgacaaagccgcaaatgtggcacaagaaattaacgccgaatatggtgaaagtatggcgtacggttttggtgctgacgccactagcgagcaaagcgttctggcgctctctcgtggggtagatgaaatctttggtcgcgtggatttgctggtctacagcgccggaatagcaaaagcagcctttatcagcgacttccagctcggcgattttgaccgttcgctacaggtgaatctggtgggttatttcctgtgtgcgcgtgaattttcgcgtttgatgatccgcgacgggattcaggggcgcattattcagatcaactcgaaatccggcaaagtgggcagcaaacacaactctggctacagcgcagcgaaatttggtggcgtcgggctgactcaatcactggcgctggatctggcggagtacggcattacggtgcattcactgatgctcggtaacctgctgaaatcgccgatgttccagtcactgttgccacaatacgcgaccaagctgggtatcaaaccggatcaagtcgagcagtattacatcgacaaagtaccgctcaaacgcggctgcgattatcaagatgtgctgaatatgctgctgttctacgccagtcctaaggcgtcgtactgcaccggacagtcgatcaatgtcaccggcggtcaggtgatgttctgatcaacagcggagatccattaaggatctccgtgagactatagaatgcctgatgcgctacgctcatcaggcatacaggacttccgccactacattaaggaaaagttatggtatccgcactcatcaccgtcgccgttatcgcctggtgtgcgcaactggccttaggcggctggcaaatttctcgttttaaccgtgccttcgacacactatgccagcaagggcgggttggcgtgggccgttccagcgggcgctttaaaccgcgggtcgtggtcgccatcgcgctggacgatcagcagcgcatcgtcgacaccttgtttatgaaaggactgaccgtcttcgcccgaccgcaaaaaattcccgcaattaccggtatgcatgcgggtgatttacagcccgatgtgatctttccccatgatccactatcacagaatgctctatcattggcgcttaaactgaaacgtggataatttcgttgtgaatgttacttgcttgcgaagttatcattttgaaacctaaatcaggtaatcacgcccatgaaacctcgtcagcgtcaggccgccattctggagtatctgcaaaagcagggtaaatgctcggttgaagaattggcgcaatactttgacaccacaggcacaaccattcgcaaagatctggtcattctggaacatgccggaaccgtcattcgtacttatggcggagtggtgttgaataaagaggaatccgatccgcctatcgatcataaaacactcatcaacacccacaagaaagagctgattgcagaagctgccgttagttttatccatgatggcgattcgatcattcttgatgctggcagtaccgttttgcagatggttcccctgctctcgcgctttaataacatcacggtgatgaccaacagcctgcatatcgtcaatgcgctatccgaactggataacgaacaaactatcctgatgccaggcggaacgtttcgcaaaaaatcggcctcatttcacgggcaactggcagagaatgccttcgagcatttcaccttcgataaattgtttatgggcaccgacggcatcgatctcaatgcgggcgtaaccacctttaacgaggtttataccgtcagtaaggcaatgtgcaatgccgcgcgcgaagtgattttgatggcggactcatcaaagtttggccgtaaaagccccaacgtagtttgcagtcttgaaagcgtcgataagctgattaccgacgcaggtatcgatccggcgtttcgtcaggcgctggaagagaaagggatcgatgtgatcataaccggagagagcaatgagtgaagcactactgaacgcgggacgtcagacgttaatgctggagttgcaggaagcaagccgtttaccggaacgtctgggcgatgattttgttcgcgccgccaatatcatcctgcactgtgaaggcaaagtggtggtttcgggaattggcaaatcgggccacattggtaagaaaatcgccgcaacgcttgccagtaccggcactccggctttttttgtccatccggcagaagcgctgcacggcgatctggggatgatcgaaagccgcgatgtgatgctgtttatctcttactccggtggcgcgaaggaactggatctgattattccgcgtctggaagataaatctatcgcgctgctggcgatgaccggcaaaccgacgtcaccgctgggcctggcggcaaaagcggtgctggatatctccgtagaacgcgaagcctgcccgatgcaccttgcgccgacctccagcaccgtcaataccctgatgatgggtgacgcgctggcgatggcggtcatgcaggcgcgcggatttaatgaagaagattttgcccgctcccacccagccggggcactgggcgctcgcttgctgaataaagtgcatcatctgatgcgccgtgacgatgccatcccacaggtggcgttaaccgccagcgtgatggatgcgatgctggaactcagccgcaccggtctggggctggtggcggtatgtgacgctcaacaacaggtacaaggcgtctttaccgacggcgatttacgtcgctggctggttggcggcggcgcactcaccacgccagtcaatgaagcgatgacggtcggcggcaccacgttgcaatcgcaaagtcgcgccatcgacgccaaagagatcctgatgaagcgcaaaatcactgccgcaccggtggtggatgaaaacggcaaactcaccggcgcaataaacctgcaggatttctatcaggccgggattatttaatccttcaatcccagacgtttcgccagccgatgcaggttggcgacgtcggtttccagcatccgcgcgcaggcagcccagttgtgatgattttgtgccagtgcctgacgaatagtttcacgctggaacgcttctgtcgcttcacgcaggttttgcttaacaacgggcaccgccgccacttctggcgtcggcaacgtcacctcaggaaaagcaaaatgttgcgcctcaagaatcacttcatcgccgctgcgggtggctctcgccagaactaccgcccgatgaatagcatgttccagttcgcgcacgtttcccggaaaactgtagtgttgcagtaaatttcgcgctccggcacttaataccacgcgggagagcccctgccgcaaacgacactgctcgcagaaataccccgccagcagaatgacatcatcgccccgctcacgcagcggcggcaccgaaagtggaaacacgctcaggcgatgaaacaaatcggcgcggaatcgccctgccagcacctcttcgcgtaaatcgcggttagtcgccgccagcacgcgcacatcgacccgcaaacaacggtcatcgccaacgcgctgaatatcgccatactgcaacaccctcagcagcttggcctgcaatgccaacgacaactcgccgatctcatccagaaacagcgtgccgttatccgccatttcaaacttcccgctgcgattactgatagcgccagtaaacgctcctttcacatgcccgaacaactcactttccgccacactttccggcagtgcagcacagttgagatagaccagcggattcaccgcccgtggcgaggcttcatgaatcgctttcgccaccagctccttaccggttccagtctcaccgctgatcaggacgttgagatcggacgccgccacaatctcaatctcttttttcagttgcgtcatgccaggggacaagccaatcatctgcgtctgtttcaccgcttcaaacggcgtggcatcgcctggcagcatattctggctttccagttgttcaatcagcaacgcattgcttaacgctcccgccgccagcgcagcaatcagccgtagctcttcgtcgctgaaaacatcgaactgatcgggctgcatcccgtcgagcgtcagtgcgccgatcaggttttgcccggcaaacaatggcagaccaacgcaggcgtgaaccttcagactctcctgcccaggaatcaaaccgtcatagggatcgggcaattcgctgtctgcgggaaagcgcaccacatccccggcgcgggcaatcgcttccagccgtggatgcccttccagcgcaaagcgtctaccgagtacatcctttgccagaccgtcgatggcaagcggaataaactgccgcgaatcgtaacgtagcaacgcagacgcatcgcactccagcacctgacgtagcgtggtgatcaggcgctgaaaacgatcctggtgaccaatcccacgctgcaattcgatggcgatattcgccagcacatcaacggaaaaactcatctttgcctcactgtcaatttgactatagatattgtcatatcgaccatttgattgatagtcattttgactactcattaatgggcataattttatttatagagtaaaaacaatcagataaaaaactggcacgcaatctgcaattagcaagacatctttttagaacacgctgaataaattgaggttgctatgtctattgtggtgaaaaataacattcattgggttggtcaacgtgactgggaagtgcgtgattttcacggcacggaatataaaacgctgcgcggcagcagctacaatagctacctcatccgcgaagaaaaaaacgtgctgatcgacaccgtcgaccataaattcagccgcgaatttgtgcagaacctgcgtaatgaaatcgatctggcggatatcgattacatcgtgattaaccatgcagaagaggaccacgctggggcgctgaccgaactgatggcacaaattcccgatacgccgatctactgtactgccaacgctatcgactcgataaatggtcatcaccatcatccggagtggaattttaatgtggtgaaaactggcgacacgctggatatcggcaacggcaaacagctcatttttgtcgaaacaccaatgctgcactggccggacagcatgatggcttacctgacaggcgacgcggtgctgttcagtaacgatgctttcggtcagcactactgcgacgagcatctgttcaacgatgaagtggatcagacggagcttttcgagcagtgccaacgttactacgccaatatcctgacgccgttcagccgcctggtaacgccgaaaattaccgagatcctgggctttaacttaccagtcgatatgatagccacttcccacggcgtggtatggcgcgataacccgacgcaaattgtcgagctgtacctgaaatgggcggctgattatcaggaagacagaatcaccattttctacgacaccatgtcgaataacacccgcatgatggctgacgctatcgcccagggaattgcggaaaccgacccacgcgtggcggtgaaaattttcaacgtcgcccgaagcgataaaaacgaaatcctgaccaatgtcttccgctcaaaaggcgtgctggtcggcacttcgacgatgaataacgtgatgatgccgaaaatcgccgggctggtggaggagatgaccggattacgcttccgtaacaaacgcgccagtgctttcggatctcacggctggagcggcggtgcggtggatcgtctttccacgcgcctgcaggatgcgggtttcgaaatgtcgctcagcctgaaagccaaatggcgaccagaccaggacgctctggagttatgccgtgaacacggtcgcgaaatcgcccgtcagtgggcgctcgcgccgctgccgcagagcacggtgaattcggtggttaaagaagaaacctctgccaccacgacggctgacctcggcccacggatgcagtgcagcgtctgccagtggatttacgatccggcaaaaggcgagccaatgcaggacgttgcgccaggaacgccgtggagtgaagttccggataacttcctctgcccggaatgctccctcggcaaagacgtctttgacgaactggcatcggaggcaaaatgagcaacggcattgtgatcattggttcgggcttcgccgcccgacaactggtgaaaaatattcgcaaacaggacgccactattccattaaccttgattgccgccgacagcatggatgagtacaacaaacctgacatcagccatgttatcagtcaggggcaacgtgccgatgaccttacccgccagacggcgggtgaatttgccgagcagtttaatctgcacctgtttccacaaacctgggtgacggatatcgatgccgaagcccgtgtggtgaaaagccagaataatcagtggcaatacgacaagctagtactggcaaccggtgccagtgcctttgtcccgcctgtgcctgggcgtgagttaatgctgacgttaaatagtcagcaagagtatcgcgcctgtgaaacgcaactgcgggatgcccgacgcgtgttgattgttggcggtggtttgattggtagcgaactggcgatggatttttgtcgtgcaggcaaagcggtcacgctaatcgacaacgctgccagtattctggcgtcgttaatgccaccggaagtaagcagccgcttgcagcatcggttgacggagatgggcgttcatctgctgttgaaatctcagttacaggggctggaaaaaacggattctggcattcaggcaacgctggaccgccagcgcaatatcgaagtggatgcggtaattgccgccaccggactgcgcccggaaaccgccctggcacgacgcgccgggctgacgattaatcgcggcgtttgcgtcgatagttatctgcaaaccagtaataccgatatttacgcgctgggcgattgcgcggaaattaacggtcaggtattgccgttcctccagccgattcaacttagcgcgatggtgctggcaaaaaatcttctcggcaataacacgccgctgaaactcccggcgatgctggtgaaaatcaaaacgccggaattaccgctgcatctggcaggcgaaacccagcgtcaggatttacgctggcaaattaataccgaacgccagggaatggtggcgcgcggcgttgacgatgctgaccagcttcgcgcctttgtggtcagtgaggatcggatgaaagaggcatttggattgttgaaaacattgccgatgtaggtgggctactgtgcctaaaatgtcggatgcgacgctggcgcgtcttatccgacctacggggacgcatgtgtaggccggataaggcgtttacgccgcatccggcaatggtgtccaaatgcaacacgttttatccgttctggacttcacccgctaaccaacgcgccgcagcaataaccccctgccccagagacaaaccgccatcacccgccggtaaactctgtggaaagagcaatgtgaaatcagcgagataatgcgccagacgtgcacgcagcaaacggttatgaataaccccgccgctaaataccagcgtagtgataccacgcatcgtggcctgctcacgcatcaacgcggcaaaaccctgcgccagcgcatcatgaaacgcccacgcgcgttgattaaccggtgcctgccagttcagccactgctgccagaaagtggcgagatccagttgattgtccacccgcggcattgtcaccggatgcgtcactccgtggcatgaggctgcgagcgcctccagagcacaagccgcttcaccttcataacttaacgtggctggcgcacagcccagtgccgccgccactgcatcgaaaaaacgcccacacgatgacgccagcggcgcgttaattccacgctcaatggcccgcgccagcacgctccagttttgctgttgcacactcgctgtttcgggataattctgccactccggcacaaagcgcaggcactgcgccagcaggtttcgccacggctgcttcgccgccaaatcgccaccagcaagcgccactgcaggcaagccgcccaggtgctcacattcgcgatagttcacccgcaggcactcgccgccccacaaagcgccattctcccccataccgataccgtcgagcgtcaaagcaatgacatcaccgccatccagcggccactgatgctctgccagacacgccgctgcgtgggcatgatgatgcagcaccgtttgcgtcggcagattcatttcgcgcgcccactggctggagacatagcccggatgtgcgtcatgcacaacgtattgcggggtgaaatcgtagatgttttgcatcaggcgtaacgcttcgcgccactgcatctggatgccatcgtcacttaaatcgcccagatgctgactcaacaccgcttgttcaccgcgcaccaggcagaaggtatttttcagatccgcgccgagacacagcacaggcggaacatttttaaagcccggaggcaaagccagcgcatccggcacatacccccgcgaacggcgcagcatttcgccgctttcgcgcaccaccgaatcatccatccgctgcacgatgtcgcggttatgtatcaaaaatccgtcggcaatgccctgcaaatccgccagcgcctgttcgttgctgatagctggtggtttaccgctcaggttgccggaggtcatcaccagcgggcattgcagttcctgtaacagcaaatgctggagcgggttcgcaggcaacattaccccgacttcgttaaggtcaggggcgatatcatcacaaagctcaggaacgtattttttatccaccagcacaatcggcgcggcgggcgtggtaagcaactggcgcgcagcgtctggtaaaccgtcagccactggcaacatgaccgccagcggtttcgccgggcgatgtttgcgcgcccgaagtgtcgccaccgcgttactgttacgtgcatcgcaggcaagatgaaatccgccaatccctttgatggcgacaattttgcccatttttaactgtgcgatagctgcctgtaatgccgcctcttgttccgcatgttcaccatgacttacccattcaagatgcgggccacactccgggcaggccaccggctgggcgtggaagcgacgatcgagcgggtcacggtactctttgtcacaggccggacatagcggaaacgccgccatcacggtaaacgggcggtcgtaaggcatggcgcgaataatggtgaaacgcgggccgcagtgggtacagttgataaacggataacgataacgccgttcgcctggggtattcatttcggcaaggcaagcagggcaagtagcggcatcgggaacaatttgcgtattcatggtgccgcctgtgctctggcgtatagtgaactcggtgggcagttgtgaccagataaacggctcacgctcgacgctatcaatacgcgccagcggcgggcagtgctgatacaattgaacaagaaacgtttccgggtcttcccgcagccggacttctacgccatcgccgtcattacagacatcgccgtgaagatttaattgctgtgccagctgccagacaaacggacgaaaaccgacgccctgcactttgccacgaatacgcagttggacaccgcaagatgtgttttttgccattgagttattcccgccatcatgaattgcgtaacccgccctgccggacacgacagcgtcgcatccggcagtcacaggtcggcgataccgcccgctccgtattctacgaatatttccgggaattcctttgatgccagaacagttctgtaagatttttagaacatcagcgccgtacggcggcgtttttctgcgctcagttgttcaagtttattacgatcgacacaaatcagcgcatgagtcgggcaagccgccatacacgccgggccgtcttcacgatggttgcacaggtcgcatttattggcttcggctttgtcagcccgtacattcagacccgcgccgctgttgcggatcaccggacgtaccaccacttccatcgcaccatacgggcaagccacaacgcaggttttgcaaccaatgcaacgttcctgcatcacatgaacaaaccctttatcacggctgatagcaccattcgggcagacgttagcgcacggtgcatcttcacactgacggcaaactgtcgccgtggaaatgttcacacctttaatgacatggatacgcggtgaaaaagtttccggggtcagcgatgcacagtcctgattttcctgatgagaaaccacgcacgctacttcacaggtacggcaaccaatacatttactcgcgtcagcaatgatgaaacggttcatcaaattctccagcaatgacagttaatgcgccgatacattcacaaatcatgccagtttttaatttactgttatttaaggaaattaatttctgtaatgcaggaaaaacgatgtcatcgacactagtgacgatgacatgtgatgacaatgtttatcgcgaaggagcaatgagtgagtcgcggcggatcagttttccgctgaaggttttcggcggtgagaaatccccgccatcgagcataaaaatcagccgtccaataatttcctgaatcatctcagtcaccggaatttttacgctggagagcgccggaacggtgtagggggcaatagcgatatcatcgaatccgataactgacacctgctctggcaccgctacgccgcgctcgtgtaacgctttcatcgcacctatcgccatatcgtcgttactggcaactaacgcgctaaatttagccccacgttcgagcaacatttctaccccttcggccccgctggcaggcgtccatttaccgttagcgataagtttttcattgagcgcaataccatgctgcgccagcgcgtctttatacccggcaagacgttcaatgctggtgggggaatccatcgagccggtaaggaaagcaatctcctgatgcccggcgtttatcaactctgccacggcgttaaaactggtctgtttatgatcgcaccagacgctatggctgctgtttttgcgcaggcggcgattaagcaccattatcggctgactgtgcgcgtcaatgatgtcatcgatctcatccacgcttaaaaaacgcgggtaaatcatgatcgcgtcgcagcgcagatccagcagatactgaatcgcctggcgctcttcttctgcgctgtgtttaccatctgccaatagcaactgccgccctttctcttccgccattcgcgcggcatgaaagagtaattcactaaaataaatgccgtggtaaagcgtgttggtcactaccagccccagcgtctgagtactcttcgccgacagattgcgcgccagcaagtttggacggtaaccgctctcttctaccgcctgaaacacgcgatctttagtctcctggctgacgtagccattacctgaaagcacgcgggaaacggtcgcttttgaaaccccggcgcgcttcgccacttccagcatcgtcgtcatcattttcatccctttacacgcaatcaacgcagtgtactgcaccgtttgccgattgtccttgcacaatcggcgggaaaaatattcaggtgaccggtttcacaaatataaaaaatgaacaattcactctcttgcttatttagtgacaactattcatgattttgtgaaaccggtttcttaattccgtttcagcatcggcatttttccgtcacgtcgactgataacaactacatctaccctactgataacaggataaaatccgatggccaaaaattatgcggcgctggcacgctcggtgatagcggcactgggcggcgttgataacatctcggcggtcacgcactgtatgacgcggttgcgctttgttatcaaagatgatgcacttatcgacagcccgacgttaaaaaccatccccggcgtgctcggcgtggtacgtagtgacaaccagtgtcaggtgattatcggcaataccgtttcacaagcctttcaggaagtcgtcagcctgctgccgggagatatgcagcccgcacagcccgtgggtaaacccaaactcacgctacgtcgcattggtgcggggatcctcgatgcgctgatcggcaccatgtcaccgctgatcccggcgattatcggcggatcgatggtcaaactgctggcaatgatcctcgagatgagcggcgtgctgacaaaaggatcgccgaccttaaccattctgaatgtgattggtgacggtgctttcttcttcctgccgctgatggtcgcggcatctgccgccatcaaatttaaaaccaatatgtcgctggcgattgccatcgcgggtgtgctggtacatccgagttttattgaactgatggcgaaagcggcccagggtgaacatgtcgaatttgccctgattccggtcaccgcggtgaaatacacctacacggtgatcccggcgctggtgatgacctggtgcctgtcatatatcgaacgctgggtggacagcattacaccggcggtgaccaaaaacttcctcaaaccaatgctgattgtgttgattgccgcaccgctggcaatcctgctgattggcccgattggtatctggatcggtagcgccatttcggcgctggtttacaccattcatggttatctgggctggctttcagtcgccattatgggcgcgctgtggcctctgctggtaatgaccgggatgcaccgcgtctttacgccaaccatcattcagaccattgccgaaaccggcaaagaagggatggtcatgccgtcagagatcggcgctaacctgtcgctgggcggttcatcactggcagtggcgtggaaaacgaaaaacccggaactgcgtcagacggcgctggctgcggcggcatcagccattatggcggggatttccgaaccggcgttatatggcgtggcgatccgcctgaaacgtccgcttatcgccagtcttatcagcggttttatttgcggcgcggttgccggtatggcggggcttgccagccactcaatggcagcgccggggctatttaccagcgtgcagttcttcgatccggcgaatccaatgagcatcgtctgggtgttcgcggtcatggcgctggcggtggtgctgtcgtttaccctcacactgttgctcggctttgaggatattcctgttgaggaagcggctgcccaggcgcgaaagtatcagagcgtacaaccgaccgtcgccaaagaagtaagtcttaattgaggatgaaaatgtcagtatttccagaaagttttttatggggcggcgcgcttgccgccaaccagtctgaaggtgcgttccgtgaaggtgacaaaggtctgaccactgtcgatatgatcccacacggcgagcatcgaatggcggtgaaactggggctggaaaaacgttttcagttgcgagatgacgagttttatcccagccatgaggcgacggatttttatcatcgttataaagaagatatcgccctgatggcagagatgggattcaaggttttccgtacctcaattgcctggagccgtctctttccgcagggcgatgaaatcacgcccaatcagcagggcattgctttttatcgttctgtctttgaagagtgtaaaaagtacggtatcgaaccgctggtcacgttgtgccacttcgatgtgccgatgcatctggtcaccgaatatggctcctggcgtaaccgcaagctggtggagtttttcagccgctacgccagaacctgctttgaagcatttgatggtctggtgaaatactggctaaccttcaatgaaatcaacattatgttgcatagcccgttctccggcgcgggtctggtgtttgaagaaggtgaaaatcaggatcaggtgaaatatcaggccgcgcatcaccagctggttgccagtgcgctagccaccaaaatcgcccatgaggttaacccgcaaaatcaggtgggctgtatgctggcgggcggtaacttctacccttacagttgcaagccggaagatgtctgggcggcgctggagaaagaccgggaaaacctgttttttatcgatgtgcaggcgcggggcacgtatccggcttactctgcccgcgtattccgcgaaaaaggggtaaccatcaacaaagcaccgggcgatgatgaaatcctgaaaaacaccgtcgattttgtctctttcagctattacgcctcgcgctgcgcctcggcggagatgaacgccaacaacagcagtgcggcgaacgtggtgaaatcgctgcgtaatccgtatctacaggtgagcgactggggctggggaattgatccactcggtctgcgtatcaccatgaatatgatgtacgatcgttatcagaagccgctgtttctggtggaaaacggcctgggcgcaaaagatgaatttgctgccaatggcgagattaacgatgactatcgcatcaactatttacgcgaacatatccgcgcaatgggcgaagcgattgcagatggcattccgctgatgggctacaccacctggggctgtattgatttagtttccgcctctacgggtgaaatgagcaaacgctacggttttgtctacgtagaccgtgacgacgcaggcaacggcacgctgacgcgcacgcgtaagaaatcgttctggtggtataaaaaagtgattgccagtaatggtgaggatttagagtaagcaaccgtgccggatgggcgtgaacgccttatccggcctacatgtcgcacgaaccaggtaggcccgataagcgcagcgcatcgggcaatctggcgtttgctatcagttctgattccctcatcaagaacatccctgtcctgattccttactgaaaaactactcttcttctaccgctaactgcgcgaaaccgccattcccttcccagccttccagacgttgataaacggtttcaaccgcatctttaatcggctgggtcatcgggtagtaaaagccgacgatatccggctggatgccgagaaaaatcacttcgccaatatcttctttcaactggtcgataagatagttcagaggcatgttatgggtagtcatcataaacatctcggcgatatcatccgggtcgatgatgcggatttcgccggggtttagccccatatccgtggcgtcgacaatcagtaaccgcgtagggcgcagttcacggatagcgacgatgtcgttttccggtgcactaccgccgtcaatcaccacccagttacctttcggcgcggcggcgcacttttccgccagcagcggacctgcgccatcatcgcccatcatgctattgccaacacagagtaaaacgtcagtcacgcagtctcctcaccatcaaatagatggcgttttcctgatgaatatcatgcagcatacttaacagcattgtactccattcctgctgctgcgaagtttgcgctgcccgggctttatcgaatgcgttggccagcatcggcacatggttaatgtcgatgacgatctcaccatatttcggcacgccttccattttgcggcgggcttcactgcctgcctccagagtggcaatccatgccagatattcatcccacgggcaggtgagcgccgcttccaggcaatcgataaccccaaggtggtgaccaatcgccaggctgtaatagaccacctgctgcgcctcggcgggcgtggcatcgttctcatcaataaatttacggctcagttgactgaacaccaccttttcactcatcggatacgcgcctcttcaacaacatgattcagatggctgacaatctcgttcagacgcggatcgttttccgcttccagccagcgtgcaacctgttcttcgccctgccctaactgtgtaaggtaatcatcggcaatctgacgaccgtaacgataacccgccaggcgacgtgcttcgcgatccactttcacgcgcagcggctgcaccatatcgccatgcaggatctccgccggttgttcatccagttcacccggcccacgggcgtgaattttctgctccagcaggccgagcgccattgcaaagccgtacagcgtggcggcaggcgttggcgggcagccagggatataaacatccacagggacaattttatccgtaccgccccacacgcagtagagatcgtggaagatcccgccgctgttaccgcaggcaccgtaggagatacaaattttcgggtccggcgcggactgccacgcacgcagcgcaggggatcgcattgcacgggtgaccgcgccggtaaacagtaaaatatccgcatgacgcggtgaaggaacgactttaatgccgaagcgttctgcatcaaacagcggcgaaagcgtggcgaaaatttcgatttcgcaaccgttgcagccgccgcagtccacgcggtaaacataggcagaacgtttgatttttttcagtaacgacgccttcatgctggcgatggattcatccaccgtcatggggaccggaatgccgttggcgtcacgggggcctaataaattgctcatcagatggcctctttcatatggcgagtcagttcaatacggtcggacggcaccaggcatttctggcgcttacattccgggcaagtctcaaagctttcgcggtggttttccgcgcggctgtcgccgttgtgcttaagcagcgcaatggcgtagtcgatctctttctggacggcgaaaggacgattgcagacgcggcagttgcacagcgcgaagcgggactgttgcaggaagtcttctttcttccacaccgccagttcgtactcttgcgacagtttgatcgccgccgtcgggcagacttcttcgcagcgtccacagaagatgcagcgcccaagattaaactcccaggcaagctctcctgtggcgaggtcagtttcaaccgttaaggcgtttgacgggcaggcattgacgcaggccgcgcagccgatgcactgctgcgggttctgctctggcttaccacggaagtttttatcaaccgcaatcggctccagcggataagacgaggtcgccgtgccggttttgatgacttttttgataaaggtaaacatggcgattccttatttcagcggcgagtttttacgctcaatgctgtaacgctcgagttctttgtacggcaccactttgctcttcttcttacgcacatcgaccacggtcatgcggtcggtacaggagtagcaagggtcgaggctaccgataatcagcggcgcatcggaaacggtgttgccgcgcagcatgtagcgcagggtcggccagttcgcgtaggtcgcggcacggcagcgccagcggtacagcttctggttgtcgccggtcatgctccagtggatatcatcgccgcgcggcgcttcggcaaagcccagcgcaaagcggtgcggaatgtaggtaaagccttccaccatcagtgggccacccggcaggttatccagaccgtagtcgatcatgttcagcgcggtatagacttcgttgatacgcactttcagacgggaaataacgtcgcagccctgctcgctgtggacttccattggcagcaggccatagccgacaaacgggtgatcggcgcgggtatcacgggcgtgaccgctggcacggaccatcgggccgacgttactgaagtcgcgagcgatttccgggtccagacgaccaatgccgacagtgcgctgttccatgttcggagtgctcagcagcacatccaccagctcctgcacttcacgacgcatctgttgtgccagctggcgggtctggatcatgtcgtctttcagcagatcgcgacgaatcccgccgatcaagttcaggccgtaggttttacgcgcaccggtaaggatctctgccattttcatggaggtttcacgcacgcggaagaactgcataaagccggagtcgaagccggtaaagtgacaggccaggccaaggttgagcagatgcgagtgcaagcgttctacctccagcagaatggcgcggatcatctgcgcacgttctggcacctgaatacccatcgcgttttccaccgacgtggtgtaggcggtgctgtgggcaaagccgcagatcccgcacacacggtcagagaggaaggtcacttcgttataacccatacgggtttccgccagtttttccatgccgcgatggacgtagaacagacggtagtcggcgtcgataatgttttcgccatcgacgaacagacggaagtggcccggttcatcagaagtgacgtgcagcggaccaatcggcacgacgttgtttttcttgtcgcccagttcgttgatgaactcgtaggtttcagcatcggtggtcggtgccggacgctgacgataatccatgctgtctttacgcagcggataaagttcatccggccagtcatccggcagcaccagacgacgttcatccggcagaccaaccggaatcaaaccgtacatatcgcgcacttcacgctcgccccacaccgccgccggaacgcgcggcgtcacggacggatattccggtttgttggcgtcaacttcgacgcgaaccgtaatccaacacttagtgcccttctccatcgacagcacgtagtaaacggcgtaatgaccattcagtttgcgttcgtcgttaccaaacagcaccgacagccagccaccctgtttgtagtaaagaaactccaccacttccggcaggtagttcacctttacggtgacagtcagctgatctttggtctgccaggcgtggtccagcacgacgcccggaaatgcctcattcagcgcggcgagataatgttgacctaatttttcttcagacatgctcaaactctctttaatcacgccgccagcaaggagacgaacgctaaaaatgcaaagccaaacccagcccaggtaatgcgcggagtaatatcaagacgcagacgggccatgctgttttcgaacagcgcgataaccaggacgccgaccaccagttttacgatggcaatcaccagcgccagcagcagtccaccggcggtgaaggtttccatttgtccccacggaataaacaccccgacgaacatctgcaacaccaccagctgtttcaggctgataccccatttcatgacgccaaagccgctgccgctgtattcagagagcgggccttcctgcagctcctgctcggcttccgccaggtcgaacggcagtttgcccatttcgataaaggtggcgaacgcacaggcacaaagcgccagtaccagcgggatgctctggctcagcggccagtgataaacggtgtcggtgatgttgctgatgttggtggaaccggcaacctgtgcggcaacccacagaccaagcagcagcatcggttcgaccagcacgccaagcatcgcttcacggctcgcgccgatagcggtaaacgggctaccggtatccagaccagaaatggcaaagaagaaacgcgcgatggcaaagagatacagtaaggtgatcaaatcacccagttgcggcagcggagaaccgacggtcaccaccggcagcgcagtagcgatagtcagcatgacgcccaccatcacatacggcgtcaggcggaacacccagccggaggcatccgggccaacgctctggcggcccagcagtttgaaaatgtcacgatactcctgcaacacacccggcccacgacggttatgcagacgggcgcgcgccacgcgggtaataccggagagcagcggcgcaacggcaaataacaccagcgcctgaattaacggatataaaacactcattctcaggctcctcgtgaaacaataatcaccaccagtaccgccagttcaaccagcgccatccggcggaacagcaacgcactaccttcgcactgccagcccggcaccagcgacaccggattcagccatttgcgcagtttcagcactggcgcaaacgcctgtttcaccggcatggcaaaaccgtgagcggtaatcaccattgatttttcgtggtcgtagccgcacacccaggccgcgccgcgggaacgcgatggcaaacgatcgcctttgcaaatcgccataatgatgaatggcagcagcgggcaggcaatcagcagcaacgtgatcatcggttgagaaacggtggtgttagcaggctccagcggcagaggtacagcagcagacagcatcggcagcagccacggcgcagcaacaccgccaattacgcagcaaatcgccagtgccactacgcttacgctcatcaggagcggtgcacaggtggcgttttcggcttctttggtacgcggcgcgccgaggaacgtgacgccatagactttcgccatacacatcaccgccagcgcaccggtaattgccagacccacggcgagcagcggccccagcagacgggcaacaaacgcgccactattgctcagtttgaagaaggattgatagataacccattccccggcaaaaccattcagcggcggcagcgcagccattgccatcagcccgactaacatggcgatggagataaccggcattttcttgccaataccaccgagtttttcgatatcgcgatgaccggtacggaaccagatgctccccgctccgaggaacagtacgcttttgaacaggctatggttaagcagatggtacagaccaccgaccaggccaagagcaatcagtgccggttgttcgagcgcgatacccgttacgccagcgcccagccccagcaggataatgccgatattttccagggtgtggtaagccagcaggcgctggatgttgtgttccatcaacgcatacagaccaccgacgaacgcggtgatcatgccgagcaccagcagcgcgatcccccaccacagcggtgcattaccgcccagcagtgacagggttaaaatgcccagcaggccaattttcatgactaccgtagaaaacaacgcggcagctggcgcagaggcgttagcatgtgcctgcggcacccagccgtgcagcggaataatcccggccagcaggccaaagccaatcacaccgagcagccagatatcggaaccgagcggcagctgttgcatacgcatatccagcaggcgcagatccagcgtgccataacgctgccacagcagccagcaagcaatcgccagcagcagagtgccaagacgccccagcgcaaaccacagtttgccctctttgctgttgctggtgaggaacaccgcgcacagggccatgatttcggccattaccacgaacatgccgaggttgctggcaatgacggcgcagacggcggcagccatcaacatattgatctgcaagccgttgcacttcacctgcgcgtggcgatgccagtcaatgttgtagaggctgacaaacagaccgcacagaccgagcgtaatcagccaaatcgcgttaagcggagaaatttgcacatcgtagcttaccagcgacagcgcaccgctcacgccaaccgcgccagtcagtacagtgaagcccgcggctgccgtatacagactaccaaccgcgccgccaattccagctatccagccacttaacgctttttgaaaagaaaagagaaatgccagaacagcggcggcgacaaaccacgccacgccgctattgatcagggaaattgcgctcatttagcctctccactttgagcctgctgaaacaaggtgagatcgccaaagtccgtgttaaaagtcagctcacgcttacgtttgctgacgcgggcgatatcagtgttatccaccagatgcagggctttagtcgggcacatccgcacgcaggccggaccttgttcatcaaagctacaaaggtcacatttgacggcgatcgcgcgaatacctggcacccagtcaagcaatgtgctgacacgcgccggagcaggcggtgccggtggcgctttcggggtattggcgtttgccggaatatccagcggacggctgccggaaaattcaattgcgccaaacgggcaggcgatgccgcacagcttgcagcttacgcacaggctttcattcaactgcacggccccatcaacgcgggtgatggcgttaaccgggcagaccaccgcgcagggtgcatcttcacagtggtgacagagctgcggcgcagattctttttcattcagcatcactctcaggcgcggcattgattgcaggccgtgctggcgatgcgtctctgaacaggcggcctcacaagtgtggcagccgatacagagcgtggagtcagcaattacaaaacgattcaccaggcattcctcaggtgattgtcatttttgacgaaaacatgccgatgaaatgtcattttcgacactcatcgacacgcccatccccaaacaggcgtaacgcctgcaaaacgggcaaagcctcagctcatgctgccgggctttgtccctttaccagttggcttaaattcaccggcacattgttttcaatagcggtgtataagctgtcgtaaacgccagcgattttttcgagatagtgttccagaacctgttcgcgatcgcggatgttgaccttgccatcaatcatgccgtcaatgctcagttgcgcctgcgcaatccgctgtttgtcttcgccatcttttgtttcgacgtaatactcgatggtgtggctgttaaagccatccgccagggtgacgtaaatgcgaaaatgttcaaaaaggacgaaacagagttctttgtccggcgcgcagctcatggcgtgatgcaggcgcgctttcgataacgtgatcccctgaaccagcgaattgcagtagatgtgccactggtcctgtaggcgacgatgccgctgtgcgatgtaatcggctttctcgcttatttcccaaatagtcattgtcaggttacccgtttaacagagatgtcagctttaagcattttttgtgccaacttttaatttattgttattaaagagatttttaagctaaagatgaatttcgtcgccgtgtcgacgtgtcatttcgacatcatcgacattattcaccgcagggataatcaacactggcacaattattgcttgtagctggcaatagttaatgggaggcgatatgcacgaaataaccctctgccaacgggcactggaattgatcgaacagcaggccgcaaaacacggcgcaaaacgcgtaactggggtctggctcaaaattggcgcattttcttgtgtcgaaaccagctctcttgccttttgttttgatctggtttgccgcggcagcgtggcggaaggttgtaaactgcacctcgaagaacaagaggccgaatgctggtgtgaaacatgccaacagtatgtgacgctactgacccagcgcgtccgccgctgtccacagtgtcatggtgacatgctgcagattgtggcagacgacggtttacagattcggcggatagaaatagaccaggagtgagcgatgtgtacaacatgcggttgcggtgaaggcaacctgtatatcgagggtgatgaacataaccctcattccgcgtttcgtagcgcgccatttgccccggcggcacgcccgaagatgaaaatcaccggcattaaagcgcctgaatttacccccagccagactgaagaaggcgacctgcattacggtcatggcgaagcgggcactcacgcaccgggcatgagccagcgtcggatgctggaagtcgaaattgacgtgctggacaaaaataaccgtctggctgaacgcaaccgcgcgcgctttgctgcccgcaagcaactggtgctcaacctggtttccagccctggttccggtaaaaccaccctgctgacggaaaccctaatgcgcctgaaagacagcgttccgtgcgcagttattgaaggcgaccagcaaaccgtgaacgatgccgcacgcattcgcgctaccggcacaccagcgattcaggtgaataccggtaaaggctgccatcttgacgcacagatgattgccgacgccgcaccgcgcctgccactggacgataacggtattctgtttatcgaaaacgttggcaacctcgtatgcccggccagcttcgatctcggtgaaaaacacaaagtggcggtgctttccgttaccgaaggtgaagacaaaccgctgaaatatccgcatatgtttgccgccgcctcgctgatgctgctcaacaaagttgacctgctgccgtatctcaactttgacgttgagaagtgcatcgcctgcgcccgcgaagtcaatccagaaattgaaatcatccttatttccgccaccagcggcgaagggatggaccagtggctgaactggctggagacacagcgatgtgcataggcgttcccggccagatccgcaccattgacggcaaccaggcgaaagtcgacgtctgcggcattcagcgcgatgtcgatttaacgttagtcggcagctgcgatgaaaacggtcagccgcgcgtgggccagtgggtactggtacacgttggctttgccatgagcgtaattaatgaagccgaagcacgcgacactctcgacgccttacaaaacatgtttgacgttgagccggatgtcggcgcgctgttgtatggcgaggaaaaataatgcgttttgttgatgaatatcgcgcgccggaacaggtgatgcagttaattgagcatctgcgcgaacgtgcttcacatctctcttacacagccgaacgccctctgcggattatggaagtgtgcggtggtcatacccacgccatttttaaattcggcctcgaccagttactgcctgaaaacgttgagtttatccacggtccgggctgcccggtgtgcgtactgccgatgggtagaatcgacacctgcgtggagattgccagccatccggaagtcatcttctgtacctttggcgacgccatgcgcgtgccggggaaacagggatcgctgttgcaggcaaaagcacgcggtgccgatgttcgcatcgtttactcgccaatggatgcgttgaaactggcgcaggagaatccaacccgcaaagtggtgttcttcggcttaggttttgaaaccaccatgccgaccaccgccatcactctgcaacaggcgaaagcccgcgatgtgcagaatttttacttcttctgccagcatattacgcttatcccgacgctgcgcagtttgctggaacagccggataacggtatcgacgcgttcctcgcgccgggccacgttagtatggttatcggcactgatgcctataattttatcgccagcgattttcatcgtccgctggtggtcgctggtttcgaaccccttgatctactgcaaggcgtggtgatgctggtggagcagaaaatagcggcccacagcaaggtagagaatcagtatcgtcgggtggtaccggatgccggtaacctgctggcgcaacaggcaattgctgatgtgttctgtgtcaacggcgacagcgaatggcgcggcttaggcgtgattgaatcttctggcgtgcacctgacgccggattatcaacgattcgatgccgaagcacatttccgcccggcaccgcagcaggtctgcgatgacccgcgcgcacgttgtggtgaagtattaacgggcaaatgtaagccgcatcaatgcccgctgtttggtaacacctgtaatcctcaaaccgcatttggtgcactgatggtctcctccgaaggagcgtgcgccgcgtggtatcagtatcgtcagcaggagaatgaagcgtgaataatatccaactcgcccacggcagcggcggccaggcgatgcagcaattaatcaacagcctgtttatggaagcctttgccaacccgtggctggcagagcaggaagaccaggcacgtcttgatctggcgcagctggtagcagaaggcgatcgtctggcgttctccaccgacagttacgtcattgacccgctgttctttcctggcggtaatatcggcaagctggcgatttgcggcaccgcgaatgacgttgcggtcagtggcgctattccgcgctatctctcctgtggctttatcctcgaagaaggattgccgatggagacactgaaagccgtagtgaccagcatggcagaaaccgcccgcacggcaggcattgccatcgttactggcgatactaaagtggtgcagcgcgacgcggtagataaactgtttatcaacaccgctggcatgggcgcaattccggcgaatattcactggggcgcacagacgctaaccgcaggcgatgtattgctggtgagcggtacactcggcgaccacggggcgactatccttaacctgcgtgagcagctggggctggatggcgaactggtcagcgactgcgcggtgctgacgccgcttattcagacgctgcgtgacattcccggcgtgaaagcgctgcgtgatgccacccgtggtggtgtaaacgcggtggttcatgagttcgcggcagcctgcggttgtggtattgaactttcagaagcggcactgcctgttaaacctgccgtgcgtggcgtttgcgaattgctgggactggacgccctgaactttgccaacgaaggcaaactagtaatagctgttgaacgcaacgcggcagagcaagtgctggcagcgttacattcccatccactggggaaagacgcggcgctgattggtgaagtggtggaacgtaaaggtgttcgtcttgccggtctgtatggcgtgaaacgaaccctcgatttaccacacgccgaaccgcttccgcgtatatgctaataaaattctaaatctcctatagttagtcaatgaccttttgcaccgctttgcggtgctttcctggaagaacaaaatgtcatatacaccgatgagtgatgtcggacaacaagggttgttcgacatcactcggacactattgcagcagcccgatctggcctcgctgtgtgaggctctttcgcaactggtaaagcgttctgcgctcgccgacaacgcggctattgtgttgtggcaagcgcagactcaacgtgcgtcttattacgcgtcgcgtgaaaaagacacccccattaaatatgaagacgaaactgttctggcacacggtccggtacgcagcattttgtcgcgccctgatacgctgcattgcagttacgaagaattttgtgaaacctggccgcagctggccgcaggtgggctatacccaaaatttggtcactattgcctgatgccactggcggcggaagggcatatttttggtggctgtgaatttattcgttatgacgatcgcccctggagcgaaaaagagttcaatcgtctgcaaacatttacgcagatcgtttctgtcgtcaccgaacaaatccagagccgcgtcgttaacaatgtcgactatgagttgttatgccgggaacgcgataacttccgcatcctggtcgccatcaccaacgcggtgctttcccgcctggatatggacgaactggtcagcgaagtcgccaaagaaatccattactatttcgacattgacgatatcagtatcgtcttacgcagccaccgtaaaaacaaactcaacatctactccactcactatcttgataaacagcatcccgcccacgaacagagcgaagtcgatgaagccggaaccctcaccgaacgcgtgttcaaaagtaaagagatgctgctgatcaatctccacgagcgggacgatttagccccctatgaacgcatgttgttcgacacctggggcaaccagattcaaaccttgtgcctgttaccgctgatgtctggcgacaccatgctgggcgtgctgaaactggcgcaatgcgaagagaaagtgtttaccactaccaatctgaatttactgcgccagattgccgaacgtgtggcaatcgctgtcgataacgccctcgcctatcaggaaatccatcgtctgaaagaacggctggttgatgaaaacctcgccctgaccgagcagctcaacaatgttgatagtgaatttggcgagattattggccgcagcgaagccatgtacagcgtgcttaaacaagttgaaatggtggcgcaaagtgacagtaccgtgctgatcctcggtgaaactggcacgggtaaagagctgattgcccgtgcgatccataatctcagtgggcgtaataatcgccgcatggtcaaaatgaactgcgcggcgatgcctgccggattgctggaaagcgatctgtttggtcatgagcgtggggcttttaccggtgccagcgcccagcgtatcggtcgttttgaactggcggataaaagctccctgttcctcgacgaagtgggcgatatgccactggagttacagccgaagttgctgcgtgtattgcaggaacaggagtttgaacgtctcggcagcaacaaaatcattcagacggacgtgcgtctaatcgccgcgactaaccgcgatctgaaaaaaatggtcgccgaccgtgagttccgtagcgatctctattaccgcctgaacgtattcccgattcacctgccgccactacgcgagcgtccggaagatattccgctgctggcgaaagcctttaccttcaaaattgcccgtcgtctggggcgcaatatcgacagcattcctgccgagacgctgcgcaccttgagcaacatggagtggccgggtaacgtacgcgaactggaaaacgtcattgagcgcgcggtattgctaacacgcggtaacgtgctgcagctgtcattgccagatattgttttaccggaacctgaaacgccgcctgccgcaacggttgtcgcccaggagggcgaagatgaatatcagttgattgtgcgcgtgctgaaagaaaccaacggcgtggttgccgggcctaaaggcgctgcgcaacgtctggggctgaaacgcacgaccctgctgtcacggatgaagcggctgggaattgataaatcggcattgatttaactgcaaattgccggacagatctgcctgtccggcatactattcatgaggttttttcggacgatatttttccggcagttctggcaccggacgcttgtcatcgatgagatgacgcacggttaagatcggatgacgccacagcattctcggcccggcccaacgcataatctgtttcatctcttcacgctttgcaggctggtaacagtgcaccggacactgcttacaggctggtttctcttcgccgaacacacatttatccagccgcttttgcgcgtaaacaaacaacgcctcgtaatgctccggctccgctgacgcctgcgggcatttcgcttgataaagatcgatcatttttttaatcgtcagtttttcacgagagatacgcttgccggacatgctgcctccacctcattaagatgtatttatattacatcttaatcttaaagggcactatgactctaaagaagaagggttcgccaaccgacgcaattttgcgtacttgcttcataagcatcacgcaaaagctgcaaaacagcatctttcccggaaccagcatcaagaactcgccgttcgcttcttcccctgaaatgattaactccggtatcatgtgcgccttatgtgattacaacgaaaataaaaaccatcacaccccatttaatatcagggaaccggacataacaccatgagtgcaatagaaaatttcgacgcccatacgcccatgatgcagcagtatctcaagctgaaagcccagcatcccgagatcctgctgttttaccggatgggggatttttatgaactgttttatgacgacgcaaaacgcgcgtcgcaactgctggatatctcactgaccaaacgcggcgcttcagcgggagagccgatcccgatggcggggatcccctaccatgcggtggaaaactacctcgccaaactggtgaatcagggcgagtccgttgccatctgcgaacaaattggcgatccggcgaccagcaaaggtccggttgagcgcaaagttgtgcgtatcgttacgccaggcaccatcagcgatgaagccctgttgcaggagcgtcaggacaacctgctggcggctatctggcaggacagcaaaggtttcggctacgcgacgctggatatcagttccgggcgttttcgcctgagcgaaccggctgaccgggaaacgatggcggcagaactgcaacgcactaatcctgcggaactgctgtatgcagaagattttgctgaaatgtcgttaattgaaggccgtcgcggcctgcgccgtcgcccgctgtgggagtttgaaatcgacaccgcgcgccagcagttgaatctgcaatttgggacccgcgatctggtcggttttggcgtcgagaacgcgccgcgcggactttgtgctgccggttgtctgttgcagtatgcgaaagatacccaacgtacgactctgccgcatattcgttccatcaccatggaacgtgagcaggacagcatcattatggatgccgcgacgcgtcgtaatctggaaatcacccagaacctggcgggtggtgcggaaaatacgctggcttctgtgctcgactgcaccgtcacgccgatgggcagccgtatgctgaaacgctggctgcatatgccagtgcgcgatacccgcgtgttgcttgagcgccagcaaactattggcgcattgcaggatttcaccgccgggctacagccggtactgcgtcaggtcggcgacctggaacgtattctggcacgtctggctttacgaactgctcgcccacgcgatctggcccgtatgcgccacgctttccagcaactgccggagctgcgtgcgcagttagaaactgtcgatagtgcaccggtacaggcgctacgtgagaagatgggcgagtttgccgagctgcgcgatctgctggagcgagcaatcatcgacacaccgccggtgctggtacgcgacggtggtgttatcgcatcgggctataacgaagagctggatgagtggcgcgcgctggctgacggcgcgaccgattatctggagcgtctggaagtccgcgagcgtgaacgtaccggcctggacacgctgaaagttggctttaatgcggtgcacggctactacattcaaatcagccgtgggcaaagccatctggcacccatcaactacatgcgtcgccagacgctgaaaaacgccgagcgctacatcattccagagctaaaagagtacgaagataaagttctcacctcaaaaggcaaagcactggcactggaaaaacagctttatgaagagctgttcgacctgctgttgccgcatctggaagcgttgcaacagagcgcgagcgcgctggcggaactcgacgtgctggttaacctggcggaacgggcctataccctgaactacacctgcccgaccttcattgataaaccgggcattcgcattaccgaaggtcgccatccggtagttgaacaagtactgaatgagccatttatcgctaacccgctgaatctgtcgccgcagcgccgtatgttgatcatcaccggtccgaacatgggcggtaaaagtacctatatgcgccagaccgcgttgattgcgctgatggcctatatcggcagctacgtaccggcgcaaaaagtcgagattggcccgattgaccgtatctttacccgcgtaggcgcggcagatgacctggcttccgggcgctcaacctttatggtggagatgactgaaaccgccaatattttacataacgccaccgagtacagtctggtgctgatggatgagattgggcgcggaacttccacttacgatggtctgtcgctggcgtgggcgtgcgcggaaaatctggcgaataagattaaagcgttgacgctgtttgccacccactatttcgagctgacacagttaccggagaaaatggaaggcgtcgccaacgtgcatctcgatgcactggagcacggcgacaccattgcctttatgcacagcgtgcaggatggcgcggcgagcaaaagctacggcctggcggttgcagctctggccggcgtgccaaaagaggttattaagcgcgcacggcaaaaactgcgtgagctggaaagcatttcgccgaacgccgccgctacgcaagtggatggtacgcaaatgtctttgctgtccgtaccggaagaaacctcgcctgcggtcgaggcactggaaaacctcgatccggattcactcaccccgcgtcaggcgctggagtggatttatcgcctgaagagtctggtgtaataataattcccgatagtcttttgctatcgggaatattaacgataactgacgaatcaaataaaaataccctgtataataggaaagcttattttacagggtaaaaccatgccatctacacgctatcaaaaaatcaatgcccatcactatcgccatatatgggtcgttggtgatattcatggtgaatatcagttattacaatcccgtttacatcaactctctttttaccctgaaaccgacttacttatttccacaggcgataatattgatcgtgggccgaagagtcttaacgtgctgcgcctgctaaaccaaccctggtttacgtcggttaaaggcaaccacgaagcgatggcgttggatgcattcgaaactggcgatggaaatatgtggcttgccagcggtggtgactggtttttcgatttaaatgattcagagcaacaagaggcaatagatctgttgctgaaattccatcaccttccacatattattgaaatcattaatgacaacataaaatatgccatcgcacatgcagattatccgggtgatgaatatcagtttggtaaagaaatagcagaaagcgaattactctggcctgttgatcgtgtgcagaaatcgcttaatggcgagttacaacaaataaacggcgctgattattttatatttggacatatgatgtttgataacattcagacgttcgctaaccagatttatattgataccggcacgccgaaaagcgggcggctgtcattttataaaataaagtagtctcatgcttcttctgtgaagcatgagtaaccaaatgttattgcaggccattattcatttttcgctaccagcaaagagagatcctgcttcgccagcgcgcgactggcactctccggcaaaccgtcgtctgtgataatctgatcaaactcgcttaatggtaacgccagccatgtcgccacctgaccatatttcgtcgcatcacagaccaaaactcgctggcggctggcactggcaatcgcccgtttcaccgtgactttatcttccgctggcgtagaaatcccccgcacactccatgacgatgcagaaataaaagcctgatcaatcatcaggctgcgcagcatggtcgcagcggcttccccgacacaggaacggttttcccgacacactgcaccgccagtgtgaataattgtgcaattactgttgtcgagcaagtagtctgcaataacgaaatcgtttgtgaccacagtcagtgactccatgtgaatcagatgctgtgctatcgctaacgtggtcgttcccgcatccagatagatacaacttcccggctgaacaagacttgccgccagcttgccaatagccgctttttgcgtcattgccagcgcagtttttacctgatgagaaggttcatgcgccacgcgtcccggagactggacgcctccggacaccagcacaacggctccctgctgctccagtttttgtaaatcccgacgaatggtcatatgtgacacattcattctgtccgttagttcagcaatactgacaatgcctttttcagctaccatctcaaggatgatttggcgacgctctacgggtatcaacttttgctccttcctttgtcctgctgacattctacgctatttgcctgcgaaacgtgcgcggcgcaactaacgcttagttcacataaaataacacacaatgttaatttatgtgaatcagctcaccatatcgttatcttccagcgcttatattcacaatatcaaacaaaatatcacttaaattaacaaggagagcagatgaaaacgggatctgagtttcatgtcggtatcgttggcttagggtcaatgggaatgggagcagcactgtcatgtgtccgcgcaggtctttctacctggggcgcagacctgaacagcaatgcctgcgctacgttgaaagaggcaggtgcttgcggggtttctgataacgccgcgacgtttgccgaaaaactggacgctctgctggtgctggtggtcaatgcggcccaggttaaacaggtgctgtttggtgaaacaggcgttgcacaacatctgaaacccggtacggcagtaatggtttcttccactatcgctagtgctgatgcgcaagaaattgctaccgctctggctggattcgatctggaaatgctggatgcgccagtttctggtggtgcagtaaaagccgctaacggtgaaatgactgtcatggcctccggtagcgatattgcctttgaacgactggcacccgtgctggaagccgttgccggaaaagtttatcgcataggtgcagaaccgggactaggttcgaccgtaaaaattattcaccagttgttagcgggcgtacatattgctgccggagccgaagcgatggcacttgcagcccgtgcggggatcccgctggatgtgatgtatgacgtcgtgaccaatgccgccggaaattcctggatgttcgaaaaccggatgcgtcatgtggtggatggcgattacaccccgcattcagccgtcgatatttttgttaaggatcttggtctggttgccgatacagccaaagccctgcacttcccgctgccattggcctcaacagcattgaatatgttcaccagcgccagtaacgcgggttacgggaaagaagacgatagcgcagttatcaagattttctctggcatcactctaccgggagcgaaatcatgatcaagattggcgttatcgccgatgattttaccggcgcaacggatatcgccagttttctggtggaaaacggtctaccaacggtacaaattaacggtgttccaacaggtaaaatgccggaagcaatcgacgcactggtgatcagcctgaaaacgcgttcctgtccggtggttgaagccacacagcaatcgctggcggctctgagctggttgcaacagcaaggttgcaaacagatctatttcaaatactgctctactttcgacagtacggctaaaggtaatatcggcccggttaccgatgcattaatggatgctctcgacacgccgtttacggtcttctctccggccctgccggtcaacggacgtacggtttatcaggggtatttgttcgtaatgaatcaactgctggccgaatccgggatgcgccatcacccggtaaatcccatgaccgacagctatcttccccgtctggttgaagcgcaatccacagggcgctgcggcgtcgtttcggcacatgttttcgaacaaggtgtggatgccgttcgtcaagagctggctcgcttacagcaagagggctaccgctacgcggtgcttgatgcgctgaccgaacaccatctggaaattcagggagaagccttgcgcgatgccccactggtaacgggcggttctggtctggcgattggcctggcccggcagtgggcgcaagaaaacggtaaccaggctcgcaaagcagggcgtccgctcgctgggcgcggcgtagtgctctccggttcatgctctcaaatgaccaaccgccaggtagcacattaccgtcaaattgcaccagcccgtgaagttgatgtggcacgctgcctctcaactgaaactctggccacttatgcacacgaactggcagagtgggttctgggccaggaaagtgtacttgctccactggtttttgccaccgccagcactgacgcattggcagcaattcaacagcaatacggtgcacaaaaagccagtcaggcagtagaaacactgttttctcaactagcggcgcggttagcggcggaaggcgtggcacgctttattgtcgcaggcggtgagacctccggcgtagtcacacagagcctgggcataaaagggtttcatattggcccaaccatttcccccggcgtgccgtgggtaaacgcactggataagcctgtctcactcgcccttaaatctggcaacttcggtgatgacgcctttttttcacgagcccaaagagagtttttatcatgagcgatttcgcaaaagtagagcagtctttgcgagaggagatgacgcggattgccagttcattctttcagcgcggctatgcaaccggttcggctggcaatctgtcgctgcttttacctgacgggaatttactggcgacaccgacaggttcatgcctgggcaatctcgatccgcagcggctttccaaagtcgccgcggatggcgaatggttaagtggtgacaaaccctcgaaagaggtgctctttcatctggcgctgtatcgcaacaatccgcgttgtaaagcggtggtgcatttgcacagcacatggtcgacggcgctttcctgcctgcaagggctggacagcagcaacgttattcgtccgttcacaccatacgtggtgatgcggatgggaaatgtcccgctggtgccttattaccgaccgggcgataaacgcatcgcacaggatctggcggaactggcagcagacaatcaggcttttttactggcaaatcatggcccagtggtttgcggtgaaagcctgcaagaagccgccaacaatatggaagagctggaggaaacggcaaagctgatttttattctcggtgaccgcccgatccgttatctgaccgcaggtgaaattgcggaattaaggagttaatgcaatgcctcgttttgcagctaatttatccatgatgttcaccgaagtgccttttattgaacgcttcgccgcagcgcgaaaagccgggttcgatgctgtggaatttctgtttccctatgactactccaccctgcaaatccaaaagcaactggagcaaaaccatctgacactggcgctgttcaataccgctcccggagatattaatgcgggggaatggggattatccgcccttcccggacgtgagcacgaagcacacgcagacatcgacctggcactggaatatgcattggcgctcaattgtgaacaagtccatgtgatggcaggcgtcgtgcccgctggcgaagacgctgaacggtaccgggcagtatttatcgataatctccgctacgctgccgaccgctttgcgctacacggcaagcgaatattagttgaagcactcagccccgacgttaagcctcattatctcttctccagccagtatcaggcactggctattgttgaagaggttgcgcgagataacgtgtttattcaactagatacttttcatgcgcaaaaagtagatggcaacctgacgcatttaatccgcgactacgccgggaaatatgcgcacgtacaaattgccggactacctgatcgacatgaaccggacgatggagaaatcaactatccgtggctgttccgcctgttcgatgaggtgggatatcagggctggatcggttgtgaatataaacctcgtggcctcaccgaagaagggcttggctggtttgacgcctggcgctaattcgttaaatccctaattacaacgtacccatacatccccccatctacggatggggtaggttaactataactttcagacagggtttcccatgtccacaattacattgttatgcattgcgttagctggcgtaatcatgctgttgctgctggtcatcaaggcaaaggtacaaccattcgttgctctgctcctcgtcagcctgttagtcgcacttgcggcgggtataccggcgggcgaagtgggtaaagtgatgatcgccgggatgggcggtgtgcttggttccgtcactattattattggtctgggcgctatgctggggcgtatgatcgaacactctggtggtgcagagtcactggctaattatttcagtcgcaagttaggtgacaaacgaactatcgctgcgctgactctggcagcgttcttcctcggtattcccgtcttctttgatgtcggctttattattcttgcgccaatcatttacggttttgccaaggttgccaaaatatcgccactcaaatttggcctgcctgtcgctgggatcatgctaactgtacatgtggcggtaccgccgcatccaggccctgtcgccgcagcggggttactccacgcagacatcggctggctaaccatcatcggtattgcgatttctattcccgtagggattgttggctactttgcagcgaaaataatcaataagcaccaatatgcgatgtcggtggaagtactggaacagatgcaactggctccggccagtgaggaaggcgcgacaaaattaagcgataaaataaatccaccgggcgtcgcgctggtcacctcgctaattgttattcctatcgcgattatcatggcgggtacggtttccgcaacactgatgccgccttcgcatcccctgcttggtacgctacagctgatcggctcaccaatggtagctctaatgattgcgctggtgctggcattctggttattggctttacgtcgcggctggagcttacaacacaccagcgacattatgggctcagcccttcccactgcggcggtagtgattttggttactggtgctggaggggtatttggcaaagtgctggtggaatcgggcgtcggcaaagcccttgccaacatgctacaaatgattgacctgcctctgttaccagccgcatttattatttcactggcgctgcgtgcatcgcaggggtcagcaaccgtagcaatactgacaaccggcgggttactctcagaagcggtgatgggattgaatccgattcagtgcgtattggtgacgctggcagcctgctttggtgggcttggtgcgtcacatattaatgactcagggttctggattgtgaccaaatatctggggttgtcggtagcagacggtctgaaaacctggacagtgttaacgaccattctcggttttaccggattcttaattacctggtgcgtatgggcggtaatttgaccttaataaaaaggtccgatgggcatcggaccttttattgtgcacagaaaaggccagcctcgcttgagactggcctttctgacagatgcttacttactcgcggaacagcgcttcgatattcagcccctgcgtttgcaggatttcgcgcaaacggcgcaggccttcaacctgaatctggcgaacacgttcacgggtgaggccaatttcacgacctacatcttccagtgttgccgcttcgtaccccagcaaaccgaatcgacgtgccagcacttcacgctgtttggcgttcagctcgaacagccatttgacgatgctctgcttcatatcgtcatcttgcgtggtatcttccggaccgttctctttttcatcggccaggatgtccagcaacgctttttcggaatcaccacccagcggggtgtctaccgaggtaatgcgctcgttaagacgaagcatacggctgacgtcatcaactggcttatccagttgctctgcgatctcttccgcacttggttcatggtccagcttatgggacaactcacgtgcggttcgcaggtaaacgttcagctcctttacgatgtgaatcggcaaacgaatagtacgggtttggttcataatcgcccgttcaatcgtctggcgaatccaccaggttgcgtatgttgagaagcggaaaccacgttccgggtcaaacttctctaccgcgcggatcagccccaggttgccctcttcgataaggtccagcaacgccagaccacgattgccataacggcgggcaatttttaccaccagacgcaagttactctcgatcatccggcggcgagaggcgacatctccacgcagtgcgcgacgcgcaaaataaacttcttcttcggccgttaacagtggtgaataaccaatctcaccaaggtaaagctgagtcgcgtccaacacacgctgtgtggctccctgcgataacagttcctcttcggccaaatcgttatcactgggttcctcttctactaaggccttttcgtcaaaaacctcaactccgttctcatcaaattccgcatcttcatttaaatcatgaactttcagcgtattctgactcataaggtggctcctacccgtgatcccttgacggaacattcaagcaaaagcctggttccgccgatttatcgctgcggcaaataacgcagcgggtttacggatttccccttgtaacgaatttcaaaatgcaagcgtgttgaactggttccggtgctacccatggttgctattttttgccccgccttcacttcttgttgttcccggaccagcattgtgtcgttatgggcgtaggcactcaggtaatcatcattatgtttgatgataatcagattaccgtagccgcgcagcgcgttaccagcataaacaacgcggccatctgcggtcgcgataattgcctgtcctttgctgcctgcgatatcaatccccttgttgcccccctcagaagcgccaaaggtttcgatcactttgccctcagtcggccagcgccaggtggagataggcgtactggttgatgtactgctgacagttggctcggttgtgcttgctgttggtaccgttacaggcgctgtgaccgtggtcgcagctggcttgttgttcggcaacattttgttagcactctgttcacccgaagattcagaatacgtaattgtcggttgcgacgcaacagcaacggtggaattttgtgcaggcttgatcacaactccttgctctgctgcgtcggcctgggtaatggcatttccgccagtgattggcgtaccggaagcattacccacctgcaaggtctgaccaacgttcagcgcgtatggtgcctgaatattgttgcgctgagcaaggtcacggaaatcgttaccagtaatccaggcgatatagaaaagtgtgtcgccttttttcacggtataggtactgccgctataactgcctttcggaatgttcccatactgacggttatagacgatgcgtccgttttccatctgtaccggctgctgagctactggctgcactggctggatttgcggttgttgagtagcctgaatttgtggctgctgtaccggctgaatttgcggttgctgggctgtagacgtcgtccccattttcggcggcggcgtaatcaacataccagaattggtatttgcaggcgcattgccattaacggagctgaccggtgccggtggatttgaagtgtcagaacagcctgccagccatagcgaaaccagtgacaaagccgcaatgcggcgaacggtgaattttgggcttcccgcgctcatttatcccccaggaaaaattggttaataaccagtgacataattaccgtgcaaggcaccctactgaacactggaaaagatgttcacgatacgctgacctgcggcaaaataaccaggaaaaatccaggtatttcctcacgttttaagccagctcacccttcactaaagggacaaagcgcacggcctccacggtatcgataataaattcgcctccccgacgacgcacccgtttcaaatactggtgctcctcccctacgggtaagacgagaatcccgccttcgtccagctgcgtcattagcgcagttggaatttccggcggtgccgccgtaacaatgatagcgtcaaacggcgcgcgtgcctgccaaccttgccatccatcgccatgacgggttgaaacattatgtaaatcaagatttttcaggcggcgacgcgcctgccactgcaaacctttaatccgttcgaccgagcaaacatgctggacaagatgcgccaggattgccgtttgatatcccgaaccggtgccaatttccagcacccgcgactgcggcgtcagctcgagtaattcggtcattcgcgccaccatatacggctgcgaaattgtctgcccctgacctatcggcaaggcgatattgtcccaggctttttgttcaaacgcttcatcaacgaatttttcacgcggcacggcggcaagtgcattcagcacctgctcatcctgaataccttgcgcacgtaattgatccagaagtgcttgtacgcgtctgcttaccattgcgtgccaactcccacgctgtttaaccagtctgaaaccacatcttgcgcgctatgcgcagttaaatccacatgcagcggcgtgatggagacatagccctcatctaccgcagcaaaatcggtccccggaccggcatcacatttaccgcccggcgggccaatccagtacagcgtattgccgcgcggatcttgctgcgggatcacctgatctgccggatgtcgtgtaccgcagcgcgtcacgcgaatacctttgatttgatccaagggtaaatccggaacgttaatattaagaatacgcccggtgcgcagcggctctttacacagtgcgcgcaaaattgaacaggttaccgccgcggcagtgtcgtaatgtttatgcccgtcaagcgagacggcaagcgccggaaaacctaaatgacggccttccatcgcggcggctaccgtaccggaataaataacatcatcccccagattcggcccggcgttaattccggacacaacaatgtccgggcgcggacgcatcagagcattcacgccaagatagacgcaatcggtcggggttcccatttgcacagcaatatcaccattttcaaaggtaaacgtgcgcagggaggattccagtgtcagagaatttgaagcgccgctgcggttacgatcgggggcgaccacctgaacgtcagcaaactcacgcaaggctttcgccagcgtttgtataccgggtgcatgtaccccgtcatcattactcagcaatatgcgcataatcacctgttgtgttgataagttccctgacaacgctggttgcaaaactacccgccggaagccagaaacggatctctacggtgacgtcatcccaccaattccagcttaattgttgcggatacagcagcatcgctctgcgcgcggcttcaactttttcgcgcaccagtaaagcttgtaattcagtttctgcggcgacagctgcttgttcgaatgccagcgcttcacgctgagttccccattcgccactgcctggcaatgcggcggttatcatcaactctttatcgttgacgcgacgctgtaattccgccagttcttcggtggttgctacaaaccagctaccacgtccggctaattgtagcgcatcgccgtcaacaacttgattaacgtctgcttttttgaggcgctcagcaacaatctgattaaacaacgcactgcgggctgccgacaaccaaaaactccgtttattgcgatcgcgcaccggagtattggtttgcgcccagcgctgcgccccctgcaagttgctaccgccaatcccaaaacgttgggcaccgaagtagttcggtacaccttttacgcaaatatcgatcagacgttgttcaacgtcatcgcgattgctcacttcgcgcagaaccagggtaaaggcgttacctttcagcgcgcctaaacgcagcttgcgcttgtgccgcgcatactccagcacctggcagccttccagttgaaaggcgctcagatcgggcatttccttgcccggcacgcgagcgcataaccactgttccgtaacagcatgtttgtctttttgcccagcgaagctgacttcacgggcatgaattttcaggaatttcgccagtgcatccgccacaaaacgggtattgcagccgtttttgaggattctaaccagaatatgctcaccttcaccatcaggctcaaagcccaaatcttccaccaccacaaagtcttccggattggctttcagcagcccggtgccttgcggtttaccgtggaggtaagtgagattatcaaactcaatcattttgttgccttaatgagtagcgccaccgcttcacaggcaatcccttccccacgtccggtaaatcccagtttttccgtagtagtggctttcacgttaacatcatccatatggcagccgagatcttcggcaataaacacgcgcatttgtggaatgtgcggcaacatcttcggtgcctgagcgatgatagtgacatcgacgttgccaagggtataacccttcgcctgaatacgacgccaggcttcgcgtagcagctcgcggctatcggcacctttaaatgccggatcggtatccgggaacagcttgccgatatcccccagcgccgccgcgccaagcaatgcatcggtcaacgcatggagcgccacgtcgccatcagaatgcgccagcaatcctttttcgtaaggaatgcgtacgccaccaatgataattgggccttcaccgccaaaggcatgtacgtcaaaaccgtgtccaattcgcattatgtattctcctgatggatggttcgggtgaggtaaaactcggccagtgccaaatcttccgggcgcgtgactttaatgttatccgcacggccttcgaccaactgaggatggaatccgcaatattccagcgccgaggcttcgtcggtaatagtcgcgccttcatttagagcgcgcgtcagacagtcatgtaacagctcacgagggaaaaattgcggcgtcagcgcgtgccataagccgttgcgatcaacggtatgagcaatggcatttttgcccggttcggcacgtttcatagtatcgcgcactggtgcggcgaggatccctcccgtgcggctggtttcgctcaacgccaacaatcgcgcgaggtcatcctgatgcaaacaaggacgagcggcgtcatgcaccaatacccactgcgcgtcgccagcggctttcaaacctgccagcacggaatcggcacgctcatcaccgccatctacaacggtgatttgcggatgattcgccagaggaagttgtgcaaaacggctatcgccaggacttatggcaatgacgacacgtttcacccggggatgcgccagcagcgcatgcaccgagtgttcaagaatggtttgattaccgattgagagatattgcttaggacattccgtttgcattcgacggccaaatccggccgccggaaccacggcgcaaacatccaaatgagtggttgccatgttaattcccgggctgatttatcgattgttttgccccgcagactgtgcgcgcttcgacgcgtcaggcaccagacgataaaaagtttcgcccggcctggtcatgctgagttcattacgcgcacgctcttcgagcgcctcctggccgccattgagatcgtcaatttcggcaaaaagttgatcgtttcgcgctttaagtttcgcgtttgtagcttgctgtgccgccacatcatcattgacgcgggtatagtcatgtataccgttcttaccgaaccacagcgaatactgtagccagaccagaatagccagcaacagcagcgttagtttacccatcctgccccctgaaaaacggcatcatcatcccatgcatccgaagacgactctacatcctctgttggggataccgcgacaacgcgggcaaatgtaccacatttgtccattgttacgtatacccagggcgtgcagaacataatctcattattagttacggtttgaattatgaacagaggagacaagaaagtacaaattagcccagtagccacataaacagtgcgccaaacataatgcctactgtcaccagggtgaaaacaatactgtagcgtagctttccgtccatcaatgaatgcagcgcaatccccaccactaccgcgacgggcatcagcgccagaaagaaaggccaggtgtagataaagaagaacagcgtgttagagccataaatcaacatcggcatcgccagcgcaaataaccaggagataaaaccgaccacggcaccaggcagtgaccatgtggtttcttcatcctcagtaaggctgtcgttatttgttagtgtaatgttatggctattacgcatatttgatcctgttactttgacgaaccgggcatggaaacccggtggtgtctcaggatctgataatatcgttctgtctcaacagatctaataattgctgtaccaaatttgttactaattgttcaccattgagatgaatttctgccgattcaggcgcttcgtaaacggaatctattcccgtaaagttgcgcagttcaccggcacgcgctttcttatataagcctttgggatcgcgggcttcgcaaatcgccagcggcgtatcgacaaacacttcgataaagcgcccttctcctacgcgttcgcgaaccatctggcgttcggcgcggtgtggcgagataaatgcggtcagcaccaccagtccggcttcaaccatcaaattcgccacttcaccgacgcgacggatattctctttacgatcggcatcgctaaaaccgagatcgctgcataatccgtggcgaacattgtcgccatccagcagatacgtactgacgccgagtttatgtaacgcctcctccagcgccccggcgaccgttgatttaccggacccggagaggccggtaaaccacagcactacaccacgatgaccgtggtgtagctcgcgttgttgcacagtgaccggatggctatgccagacgacgttttcgtcatgcagcgccattatttatcccccagcaaatcgcgcgcgccccagtgcggaaagtggcgacgaaccagagcattcaattccagttcgaatgcactgaattcagatggcgcagcagttgcctggctaactggctcgtgcaccataccggcacccacggtcacattgctcaggcgatcgataaaaatcagcccacccgtcaccggattttgttgataacgatctaacaccagcggctcgtcaaaagtgagatccacgaggccgatcccattcagtggcaggttttcaacttcacgctgggtaaggttattaatatcaacctgatagcgaatgccatcaacacgcgcgcgcgtcttcttaccggcaattttgatgtcgtaactctgccctggagaaagcggctgttccgccatccataccacatccaccgacgcgctctgcaccgccggtaacgcttcgtctgccgccagcagcagatcgccacggctgatgtcgatctcatccgtcagcaccagggtgatcgcttctccggcaaaggcttcttcgcgatcaccatcaaaaatcacgatccgcgcgacgtttgattccacaccagagggcagcactttgacacgttgcccgacttccacgcgaccggatgccagcgttccggcgtaaccacgaaaatcgagattcgggcgattaacgtactgcaccgggaagcgcattggctgagcatccaccactcgctggatctccacggtttccagcacttcgagcagtgtcggaccgctgtaccacggcatactttcactttgcgatgccacgttgtcgccttccagtgcagagagcggcacaaagcggatatccagattacccggcagctgcccggcaaaggtcaaataatcttcacgaatacgggtgaacgtctcttcactgtaatccaccagatccattttgttgatcgccacgaccagatgtttgatccccaacagtgtggagataaaactgtgacgacgggtttgatcgagcacgcctttacgggcatcgatcagtaagatcgccagttcacatgtcgatgcgccagtcgccatattgcgggtgtactgctcgtgccctggggtgtcggcgataataaatttacgcttctcggtagagaaatagcggtaggccacgtcaatggtgatgccctgttcgcgctcagcttgcaggccgtccaccagcagagccagatccagcttttcgccctgggtgccgtgacgcttactgtcgttatgcagcgatgagagctgatcttcgtagatttggcgggtatcgtgcagcagacgaccaatcagagtacttttgccgtcatcgacgctaccacaggtcagaaaacgcagcaggcttttatgttgttgcgcaatcatccaggcttcgacgccgccttcattggcgatttgttgtgcaagtgcggtgttcatcttaaaaatacccctgacgttttttcagctccatagaccccgcctggtcgcggtcaatcacgcggccctgacgttcactggtggtggaaaccagcatctcttcgatgatttccggcagtgtttgtgcatttgactccaccgcaccggtcagcggccagcagcccagcgtacggaaacgcaccatccgttttttaatcacttcgcccggttgcaggtcgatacggttgtcatcaatcatcatcaacataccgtcgcgttccagaaccggacgttccgcagcgagatatagcggaacaatgtcgatattttccagccagatgtattgccagatatcctgctcggtccagttagagagcgggaagacgcggatgctttcgcctttgttaatttgcccgttgtagttgtgccacagctccgggcgctgatttttcggatcccagcgatggaagcggtcacggaaagagtaaattcgctctttagcgcgggatttctcttcgtcacggcgcgcaccaccgaaggcggcatcaaaaccgtatttgttcagcgcctgtttcaggccttcagttttcataatatcggtatgtttcgcgctgccgtgcacgaatggattaatccccatcgccacgccttccgggtttttatgcaccagcagttcgcagccgtaggctttagcagtacgatcgcggaactcatacatctcgcggaatttccagccggtatcgacatgcagcaacgggaaaggcagcgtacctggataaaacgccttgcgcgccagatgcagcatgacgctggaatctttaccgatagagtagagcatcaccggatttgagaattctgccgccacctcgcgaataatgtagatgctttccgcctccagttgccgcaggtgagtaagtcgtatttgatccataaccgttcctttgcaataccgctattttcttgccatcagatgtttcgactatagggagcgtaagagaacgaatgaaattaccaattagaatgagtagttccttaacggaataacgatttggcaaagctaatatcaaaaagtgcttaaggcaccggatttcgggcgtttaggaagatttgaaattgttttagcgcagcggcagtttcatactatggcggtaaaaaaatttgcatggtatttaaggactcactatgttttccgcattgcgccaccgtaccgctgccctggcgctcggcgtatgctttattctccccgtacacgcctcgtcacctaaacctggcgattttgctaatacccaggcacgacatattgctactttctttccgggacgcatgaccggaactccagcagaaatgttatctgccgattatattcgccaacagtttcagcaaatgggttatcgcagtgatattcggacatttaatagtcggtatatttataccgcccgcgataatcgcaagaactggcataacgtgacaggaagtacggtgattgccgctcatgaaggcaaagcgccgcagcagatcatcattatggcgcatctggatacttacgccccgctgagcgatgctgacgccgatgccaatctcggcgggctgacgttacaaggaatggatgataacgccgcaggtttaggtgtcatgctggaattggcagaacgcctgaaaaatacgcctaccgagtatggtattcgatttgtggcgaccagcggcgaagaggaagggaaattaggcgctgagaatttactcaagcggatgagtgacaccgaaaagaaaaatacgctgctggtgattaatctcgataacttaattgttggcgataaattgtatttcaacagtggtgtaaaaacccctgaagcagtaaggaaattaacgcgcgacagggcactggcaattgcgcgtagtcatggaattgccgcaacgaccaatccgggtttgaataaaaattatccgaagggtactggctgttgtaatgacgccgaagttttcgacaaagccggtattgccgtactttcggtagaagcaacaaattggaatcttgggaataaggatggttatcagcaacgcgcaaaaacagctgcattccctgcgggaaatagctggcatgacgtaagactggataatcaacaacatattgataaggcacttccaggaagaatagaacgtcgctgccgtgatgttatgcggataatgctaccgctggtgaaggagctggcgaaggcgtcttgatgggtatgaaaatgggagttgggagttctaccgcaggggcggggaactccaagtgatatccatcatcgcatccagtgcgtccggtttatcctcgctgacgcggggaactcttggttgttcggcgttttgaagagaacaaaaacggtttatccccgctggcgcggggaactcgactcaatggcaaccgtcacggcctgtcctggcggtttatccccgctggcgcggggaactcccccgcttcgctcgagtacccgctctatatcccggtttatccccgctggcgcggggaactcgcggtcgattttgctggcgttgtttcggctggcggtttatccccgctggcgcggggaactctgcataaaaaccagcgtgaagaactttgcagtcggtttatccccgctggcgcggggaactcctttattccatcccttaatgctttgatgaaatcggtttatccccgctggcgcggggaactcaattgattgctgggtgatattagaaaacgtcgcggtttatccccgctggcgcggggaactcatgtaatgaatattaagcttttcacattgtcccggtttatccccgctggcgcggggaactctgttgcagcggcgcaccgctgacggactcgcccggtttatccccgctggcgcggggaactccggaactggtccagcgttaaccggcggcggatcggtttatccccgctggcgcggggaactcttgctgtatagagattatcggcgtgggattgtcggtttatccccgctggcgcggggaactctctaaaagtatacatttgttcttaaagcattttttcccataaaaacaacccaccaaccttaatgtaacatttccttattattaaagatcagctaattctttgttttcaaacaggtaaaaaagataccaaccttaaaccatccaaatctaccggggtacgcctgtttaccccaaatgtctggaactcaaatcccgattccgtattcgttgcccatgccatcactacattgccttcttccgccagtccagctatttgttcccagatcatttcacgaatttttgcggatacatcacctacatatacccctgcacgtacctccaacaaccagatggctaatctgcctcgtaagcgcggaggtacattttcagtgaccacgaccaacatactcatctcagctactccgatgtccggcatctcccagagaaacgggaagcggaatggcaacaggctgtgcatcttcaggtggggccggcggttgtatttctccagcagcaagcacgtcctctataagcggaatcaatttggctaatgttttactactgcgaaaaatatccctgcacgccaaacggacttcccggtccggctcaccagggttacgacgcgctatctcaaaagctttcggtacaacagtgtcaaatttaatgatgtctgcaatatcgtaaacaaaggaaagaggctttcctgtatgcacaaacccaatagcgggtgcataaccagctgcaagtatcgccgcttcagttacgccgtataaacaggaagttgcagcgctaatgcattggttgaccgtatcgcccttttcccagtctttcggatcgtagcgacgtccattccatgtcacgccgtattgcttcgccagaagtgcgtaggttgcccgcacgcgactgccttctatacctcggagttgttctacggagcgtcgggcgggcgctggttcgccaaaccgtagttcaaacattttgcgtaccactttcagacgcaaatcttcatccagagcaagttttgcctgatagagcagcttatctgaacgcgcaccaccaggctgaccagaagcataaacacgaacacccgcttcccccacccataccaataatgttccaacttgcgcagccaagcgtacagctgcatgcgaaacccgtgtaccaggctccagcatgatgcaggcaaccgagccaacaggaatatgagtgcggatccctgtcttgtcgataagtacaaacgcgccatcgattacatcgatctgcccatattgcagaaagatcatggagacgcgatctttgagtggaatggggttaagaggaagccaggtcattttattacaccttaatcacagtggagccagggatagcaagccacatcccatcgatttggctggcccaataccttgctgtacaagatctattaacgctggcgcgtcgttgatggtgatcaccccttcaaagcaaaccgtttggatctttccacttttaccatcaccagaaaaatactgtggtcgttccgatatgggatgcacatcttcaacgcgcgcggcattgcccaatttacgctgcaaccacgcgatttgttctgcttcttttattaacggaacccgacagcgttttatattccctttactgtccaggcgtttttgattgtcgagaatagtttttatcggatttgcccgaagccgaaaatagagtggaacaccaacctgaagttgaaattcaacctgtttagttttaatgactgtcgcaacggcagttgaaacaggcatttgcgctgactgcaataaaacatgacagccttctggtgtgtttcgcttctcaacatgaaaaagaaaatcacgagcagcatccggtctgtttggaaataaatgccataatccctggtgaagttggtaaagatccctgctccaggccctggcaatgatgactttactgagatacatccatacctcctttaatcacataccattctcgggaagcaaattgtcgaggcaaggtgatcatcggttcgtcgcgcaccgtaaattttaaatgatgcccgtcaactgattcctcactataaatatcgccgccaacgggctcataatttaatagcaccttctgaggatccgatgcctgacatgtcccgagaaaaagcggttgtgttagcggacaactcctccgccccagatacggtgtataccgaggctttaatactgctttttcaagttctgacataaccatcgttgcctgtggtgttaaccagagagcgacggtaaaggaggcatcacataaatattcgcgccatgtttgaatcgtttcatgacttttcaaaccacggtaatcttctcgcgctccaaggactgtatggtaatcacgcaaccccgttacagacacacgacgatcgtcaagaatgagttcatcgcagcgcactgcaaattgcacactctctgataacgcctgtaatgaagaagtatcatcacgttggatcccaagacaagccccgagtagccctaataacccgcttcgggtcggaaatcttccggtaggtcgcgttccttcaaaggtcggctgcccccaggcttgcattggcccagcaagtcgcaagatcaaataagatctcatgttcacgcctcgccattattacgaacccaggactttaactgttctaaagtaggcatttgctgtacctggccagtaatagggtctacatcagacaagctgaattgcgcagcggctccgttcagaccatatccattggcaacgcgatcccaatattgattaaacgcctgtaaagacggttgcaaaaagccatcgttcgctttcaccgctttttcaaaagcatttgccatagaaagtggcatatcggagaaattaaccattaccatatccgcagggttaaaagcggcataagtacgctgttttgctccagggacctctgttgccagcatatgaacaacatgggttgcaatttccagagcctgctccctggaggcaccgcctaaattttcctgaagttgagcgaggttaatattggcataacgataaaaaacacccgatgaaaattcctgtgttcccagatgtgcagaaccttgttcctgtaaatcatctacggcggtgaaccagtcaatatcagaatcaacctgatgggtagtgatcgcgtgcgcaatagacattgcaccatcaacttttcccaactcactcatcatgccgctggttgccattcttccactaagcgcaatatcaacaccctgctgtaaattcacacgtatggcggcaatatcttccttaagaactttgagcagctttttatcatccagattatcagcctctgcttttgcaacctgctcacagaaccaggctatttcccccacaacccagggagtaaccgcatcggcagaaatcttttcggcttcatcaactgatttaccggagagcagcgctaatgtcttatcgatgattttttggtcaaaacgttcactaagtttttgccgaagaacatcacgtaattgtgcaagatgaattgttctgagactggattcaccaatattttgtgcgtaataatcacttttacgcatcgcacgtttaaggctttgacttgaaattcttactcgtcttttcccgccgaaaatagcgtctttctgcatgttcatatcgtcgcggttcagacatgaagggctgtgagagatcagaacatgaatattgataaagttagacatagaaaggtttccttacgcatttttgtttgtggtcaatacaaaatcttccagaagttgctggcgttcgcgctttccccaccaggtcaacatcctggccattaatggccagtcaagtacgggttcggcgtgagcaagcaatcgacgtaactggaccatatcggctgttctgtcagcccgaattaattgaaagatacggcgctcgttaattcttccactattggctaaagctcttcccaacgagatacctgttgtttgctccggttttttgtcctgatgtcggatgacattctttcctgcgctcaggcaaaacaccatgcgtaaaagagcctgctggtgacgtgagttttcccaaccaaaaggttgcaccagcctataaaacgcagggatatcgcgtaattcatcaggttctgaaacacgtctaatttgcgcacatgctccgttatccagttgttgccaggctcgatataaagccattgcatcaatttcatcagccatttgatggccctccttgcggttttaactcccgtaaatgtttgtatagcgtggcgcgggcgagcgctaatgtgcttattaatttaggatgatgtgcatagggcgctacagattgattaaataacatttcacacaattgatgaagtttgtctcgtaaatcagctatgacctcatcagcctgggaaaaattaacattcgccagtacatcgggaattaataattcactctgtcgatagaaatgcctttctgcagtctcatgaacagagactccagcccctttaaagtctttatttttaaacccttctgcaaaggtatataacgccttgcgtaaggctgttttatatcccaaaccaacagtaactatttcgtttatcacattgccgtattgttgccacccctgattaaacatcaacacatcatgacgccgttcaagaatagatgcttgattattacgatatccccccataatcaattcaagaggactttgcggcgcaatatttctgaattgattcacaaccgccgccacgcgatttccattttcattttgaataatcttatctaccacaactcggctgatttgtgtccatgatggtgcggaggtggtgaaagcaagaaatttttcctcaacctcccctttcttgactgttaccagacaaggggaatgcggatggggccatagcccattaactgtaaaggtaaatttttccttaagaaaaccggtataacgcaaattgctttcctgtccacagcaagaacattttccaatcccaatgggatcgcataattcaatatgcgcaggttgccagaataagccgcggacaaagccaattgacgaagctggcacagattcattgggtttgacaggcttaacccaggtaggttggttttccgtatgtgattcattgggaaattgtttttgaagacgaggtattgtgaggacattgagtaacaccgtcgagcgaagatcgatcccacgtacgaaggtggttataggtgttcctccacgtaaaccgcttttaaagccaccaccaaaaccaggtgcctgattcgcctggttgaataacgcaatcgcagtgcatccaccacataatgcttcaccctgacccggttgattgacaaaagcacaattcgtcgcgccgcttacccctgccaacagtttttccattggagtcacatcatttgctttgacacctttggtctgcataaagggatgttctgcgtgattaaggtagaacatatctatccacggcgcgatgagttgttgaaactcatcttcagtgagcggattcattatgcgatgtcgaaattcaacgtcatcttttgccgggtcgataatttgcccaatgcaaaccagcagtgctaaagcggccagttccatatcgtcacggggcaaacttaatcgccactgatctctactgcagtatagcgattgcagatttatgatttggactttccccccgtttcgcgggcgtacagggatccagttatcaataagcaaattcatttgttctccttcatatgctccgacatttctcctgcatttctatacgtcggcacacttccgttatcggtaaaaacaaagaaaaaatacggcgtaattaattcaataatcacattcactgcaaaaatatattcattggttaaatacaattaacctatacatatattaagatgtgttgaattgtttaaagacaataatgcatgcatttcaaatctgcaagttattcgttttattatcaaagaaacttttagttataataattaccataaattttattacataaaatattcatactgcgaatataaaatctcataccgggaaattaaaagaagatgtacattgtgcaccttccctacttaagtagggataaaccgttattggtcttgttatcgtcattgataccaatcattcccgaagttatttgggatttgcagggatgactctggtcatcccttcatcccgagtgtaggtaataacaatactgttaccctgccagaaccatccatcctgattctgtttcccttccagccaaagtaacccatcttcatctactacttcagaaaaactacgtttccaggtgaagggtacattgacgcgattaagtgcaagcgcctcatactgctgttcataacttaggtcctcgtagacctggccatcgagcagttgtttacctgaagacgtttgtacataaggcaataatggcaggctcatttccccatccctcgttaccgcaagaatggtttcatcgttatcctgcaaactatattcttcagcccactgcagaaccttgcgagccttgaacctcttttcacactcagcgctttcaaacttatccatgcctttgataacccattctggctcatccatttcagcatcatcgtaaatgctatccagccattgccggtaggcatcagggaaaaataaggatgctccattaagttcctcaatatgttgctgcgtccgccacatgactctaacgttgctataaatatgctcatgtcgtccgtaaccctcgccatcaggcagcaaaatggtggcaacaggaatctcaaaaccagcgggacgatatttgcgatgatggcgatgtaaacgacccaatcgttggaaaagcaaatctgcgggacaatgctgggtaattaaccaatcaaaatcaacgtcgagcgattgttccacgacttgcgtggcgacaagtattcgtccaacatttcgctccccattttttccgaaatcgctaataacacgattctctttttctcgacgatcgttcagcgtaaagcgtgcatgaaacaaatctatatctacttgcgtgttatttagctcctttagccgttggtagcatacttgtgcaacgtcaaccaaattgcaaataagacagacttgtgcacccgcgtttgccgctgcgatcattcgctctaacatcgtaaggtcaggtaacatgtcagctaaataaataggttctggctgaatcgaaaagcggggcgggagttgttctggatgagctagcagatcaaaacgttgcgcaccattcacacctcgccagttaatgagtggatatgcggagttattttccactggatctgtatgcagaccataagtatccagaagtttctgtttttgtttcattggtagggttgcggaaagaagaataacactccctcccacatcagcctgagccttgagcactgcctccagcaagccgttcatataggtgtcgtaagcatgaacttcatcaacaattaaaacacttcgaccaattcccaaaccacggataaagcggtgtttaactggcaataccgatatcaacacctgatcaatcgtgcaaacgccgatttgcccaagaaacactttcttattgctttgtgacaaccactgacaacactgaacccacgcttcttcttgcccctgttcagtaatcgcgcgtgattttattgattgaaagaggtggttaaaccgtgaattgccatgagcaagaataagatttggggatgaaaataagtggctcgcgctcgcttccattctcgtaagcatagcattcgcggtagcttgtgttgggagggcaaaaataacactatccgcaatttgttgatcaataagtttccaagcataggccagcgctgtttccgttttaccggagcctgtaggtgcctctattaccgtcagcccgggagctactggaagagcatcaactaacacctgtaattgtctgggttgatagccattgtccagtagtgcatgaacaccttcataacatcgcttatttgatacaagtccactcaactccaatacccggctcgcatcctgctgtcggtcctggaaatacgttctcagagcatttatgtcggaaggcgcatcctcattaaacagaaaggtattcgttgtagtccaggagcctaaccagtcagcaagcgagcaaaaacctgctaacagtgatgaacaatcaggtggtatatcgtttatagataaccccgctggcgttaaaaataatgcttccagtacagatatccactcctcacgagcctgtttatcttgcgcagcataagatgccagagaagctggcatttcccaacgcgacttatcttgatcctgggaatgtaatataaaaccatgatgtcctgtaacggcctctacccatggaaaccaggactcataaggatgaggagcggcatcaaaaaaactgaaaaaatccccgagagattgctctgaaagtgaatcctggttaaaccaatacagaccggctgcaccatgattaaatttacggcacatttgtgttgatggaccattaagtgatggcgttgcaggatttaatttcagccaactttctgctgatttatattggaatcgtatatcaaactttccaatatcatgaagagcaatgaaaaataacagccaggccttcaccctctgttttgatagcatttcatttcggcaaaaagtattttgcagtacgactgattgatcccaccagcaatctgcaacagcagcaacatcaaggcaatgataaattaacagatgaatatcatttcctttcgtcaagctttttgaggattttccccagtaatggcatatatatttaaaaggttccattaatagcctccctgtttttttagtattatcgatgatatcagcgggctatttttcgatgctgctcataaatatcgaattacagtgatatacacatgtcttgcctccctgcaaagaagagactaacattcgaattgtttgggttcgaacgtaagcctcaggttgtagaaatatcgcctggggcttttgtccatctggaacctcgcgaatgcttaacgccagacagcctcaagcacccaacgccattctatacctgttaattttccctgcgatgttcacctttaaatgccggaatgctgctcgcaaaataaaaacgcccccatcatttctgacagaggcgtttaatttatccggcaatatttacccttcgtgcaatccacattccctttttaagccaaagaaacgtgtttcttcttccgacatgccaggttcccatttacgggttgtatgggtatcaccgaccgataaatatccttcatcccataatgggtgatatttcaggccatgtttttgcaggtactgataaatagttcggttatcccagtcgataatcggcagcactttaaatacgccacgctgaattgccagcaccggtaaattggcgcggctgccggattgttcgcggcgcaggccagcaaaccaggtttgcgcgttaagttctttcagcgcccggttcatcggttcgactttgttgatgtcattgtacttttcaatgccttcaacgccctgttcccacagtttgccgtagcgtgcttcctgccaggcggcgctttcggtagcacggtacactttcaggttgagcttgagtttgtccgttaactcgtcaataaagcggtaggtttccggaaacagataaccggtatcggtgaggatcactggaatatccggccgaatctgattcaccagatgcaggctcaccgccgcctgaatgccgaagctggaagaaagcacatattcaccgggcagattatccagcgcccaggctacgcggccttcagcgtccagtttttccagttgggcgttagtttccgccagcgccagaatgcgatctaccttcggcagttcgttcagggcgtttagatcgagtttggacatagattcctcactgtttgccttgcctgatgcgacgctcacgcgtcttatcaggcctacaagaccgggctgatggttaatcccacaaatcgcgcgccggatcgagcaccgggcgaatgatgcccgcacgcaccgtaaagtcgccgaagccttcacccgcttcgcgctctttcgcccagcgccctatcagttcatcaagcgacgccaggatttccggctcggtgatgttttctttatacatccgagggatacgtgtcccaatgcggttgccgccaagatgcaggttgtagcgacccggcgctttacccaccaggcccacttccgccagcatcgcgcgaccacaaccgttcgggcagcctgttacacgcatcacgatatgctcatcgctgacaccatgtttcgccattaaattatcgatgttgtcgataaaagacggcaggaaacgctccgcttccgccatcgccagcgggcaagtcgggaatgacacgcaggccattgagttttcacgctgcggcgtgacggcattcattaacccgctctctttggcgatcttctcgatcttcgctttctcgctttccggtacaccggcgatgatcagattctggttcgccgtaatgcggaaatcgcctttgtggatcttcgcgatctccagcaggccggttttcagcggacgcgccggataatcaaggatgcgaccattttcgataaacagcgtcaggtgccagttatcatcaatgcccttaacccagccaatacgatcgcctcgtccggtgaactcatatggacggatcggttcaaatttgatccccgcgcgacgctccacttccgctttaaacgtctcaacccccacgcgctccagcgtgtatttggttttggcatttttacgatcggttcggttaccccagtcacgctgagttgtcacgacggcttcggccaccgccagcgtatgctccagcggcagatagccaaactcactcgcggtgcgggcgtaggttttcttgttgccgtgttcgatggaaagcccaccgcccaccaacaggttaaagcccaccagcttgccgttttcggcgatcgccacgaagttcatgtcgttggcgtgcagatcgatatcgttctgtggcgggatcactaccgtggttttgaatttacgcggcaggtaggtctggccgaggatcggttcttcatcagtcgtggcgactttttcctggtcgagccagatctccgcatacgcgcgggtacgcggcagcagatgctcagaaatcttcttcgcccactcgtacgcttccgcgtgtagctgcgactcgtaagggttcgaggtgcagagtacgttacggttcatgtcgttagcggtcgccagcgcatcaagaccaaccgagtgcagcatctggtgcaccggtttgacgttctttttcagaatgccgtggaactgaaacgtctggcggttggtcaggcgaatgctgccatagatggtgttttcaccggcaaatttgtctatcgcctgccactgtttagtggtaatcaccccacccggcagacggcagcgcaacagcatcgcgtggcgcggctccagcttctgttcagcacgttcggcgcggatgtcgcggtcatcctgctgatacatgccgtggaagcggatcagcaggaagttgtcgcccttaaagccgccggtcagaccgtcgtttaaatcttccgcaatggtgccgcgcaggtagttgctttcaagcttcatgcgctcggcgtctgtcagttttccttcgaccactaaaggccctggatgtttttcgctcattagtagacatctcgctgataacggcgctctacgcgcagctcacttaaaaattcatccgccgcttcggtgtccatgccaccaaattcggcaatcacttccagaagtgcctgctcaacgtctttcgccatgcgattagcgtcaccgcagacataaatgtgggcaccgtcattgatccagcgccacagctccgcgccctgttcgcgcagtttgtcttgtacgtaaactttttctttttggtcgcgcgaccaggcgagatcgatccgcgtcagcacaccctctttgacgtagcgctgccactccacctggtagaggaaatcttccgtaaagtgcgggttgccaaagaacagccagttttttcccggcgcttcatcggcagcacgttgctgcataaaggcgcggaacggcgcgatgccggtgcctgggccaatcataatcaccggggtttctggattggctggcaggcggaagttatcgttatgttcgataaatacgcggacttcgccctcttcttccacgcggtcagcgaggaagctggaggcaccaccggcacgggcgcggccttccacgtcgtaacgcaccacaccaacggtgacgtgtacttcgttctcgacttccgcctgcgaggaggcaatggaatagagacgcggcgtcagcgggcgcagcagattaattagcgcttcggcatcaagctgtgccggggagaaacgcaccatgtcaacaatcggcgtcgtcgcggcgtaatgctgtaacttcgctttatcgcccaccagcggcagcagtgtttcactgcgggtaagcgtggcgtaattctcaacaatgttggcggtgttgacggtcagttcgaagtgccactgtagcgcttcgttcagaggcaacgttttgccctcgacggtgacaggttcatcgcctttcagccacagcagttcgacaagttctttcaccagtgccggatcgttctgataccagacgcccagcgcgtcacccggctggtaacgcaggcccgagtcacctaagtcaatttcgatatggcgaacgtctttttcagagttacgcccggtaattttctggttaacagagaggctagccaccagcggcgcgtctttgctgtacgggctggtgtggatttcatttaccgcgccagtagcgacggattgcgaaggtgccgcgacaggcgcacgcgatttaagcgcatcaaccacgcgggcgcgccactcgctggcagcagcctggtattcaacatcggcatcgacacggtcgagcaggcgttcaccacccagttccgccagcttgctgtcgaaatctttcccggactggcagaaaaattcataagagctatcgccgaggctaaacacggcaaacgcggtgttttccagctttggcgcttttttggagaacaggaacttatgcagcgcgacggcttcttccggcggttccccttccccttgcgttgacgtcactacgatgagcagtttttcgctggcgatttgtttgaatttatagtcgcccgcgttcaccagcttaacgttcagttttgctgctaataaatcatcacgtaatgcttcagcaacccggcgcgcattgccggtttgcgaggcggagataatagttatacccggcatttctgcggctggcgctggcgtcgctgcaagcgcagcaggctgctgattgagtacgccccagaaatagccagaaacccaggcaagctgggtgggagttaaatcggtcgtggccgcctgaaggcgtgccagttgctccgggttcaacggaagcaacgcggaaggtgggacctgtgtcgtcatgcgtcgttatgttccagtaagcaaagctgtttctgcgccctgtcagcgcccataaaacagaagagaaggtaaggttaacggggcaaacggtgtggattaaagacgggatagcgataactaataaccaaatcgactaacctgttttagcaatagtctttaacaacaaaatagattaaccaacctaatgaaaaacaaatgaatttagccaatcattaagataaatcagcgattttgcgcaacaaagtcgttttagataatgcgaaaaaacagcctttccggtactctacggcggttttatcgtcctgtagagaaattatgatgtccaccacgttatttaaagatttcaccttcgaagccgctcaccgcttaccacacgtcccggaagggcataaatgtggtcgcctgcacgggcattcctttatggtgcgactggaaattaccggggaagtcgatccgcatacgggctggattatcgatttcgctgaactaaaagcggcgtttaaaccaacctacgagcgcctcgatcaccattatctcaatgatattccaggtctggaaaacccaaccagcgaggttttagcaaaatggatttgggatcaggttaaacccgttgtgccgctgttaagtgcggtgatggtaaaagaaacctgcaccgcaggttgtatctatcgcggcgaatgataagagtgtgtcggcggtcaatttcccttaagtaacgctatgttagggtgttgtgttctggatatctggggcatgacatggaagacgactgcgacattattattattggtgccggtattgcaggcaccgcttgcgcgttacgctgcgcgcgagcgggtttatccgttttgttactggaacgcgctgaaatccccggcagcaaaaatctttccggcgggcggttatatacccatgcactcgcggaactcctcccgcaatttcatctgaccgcgcctcttgaacgacgcatcactcacgaaagcctttccctgttaacgccggatggcgcaacgacgttttccagcttacagcccggcggtgaatcctggagtgtattacgtgcacggttcgatccgtggctggttgccgaagccgaagaagaaggtgtcgaatgcatccccggagcgacggtggatgcactgtatgaagaaaacggcagggtgtgtggtgtcatttgtggtgacgatattctccgtgcccgttatgtggtgctggcagaaggtgccaacagcgtcctggctgagcgtcacgggttagtgactcgtcctgctggtgaagcgatggcgttggggatcaaagaagtgctgtcgctggaaccatccgctattgaagaacgttttcatctggagaataacgaaggcgcagcgttgctgttcagcggcaggatctgtgatgacttacccggcggcgcatttctttatactaatcaacaaacgctctcgttagggattgtttgcccgctctcttcccttacgcaaagccgtgttccggcaagcgagctgctgactcgctttaaagcgcatccggcagtgcgcccgcttatcaaaaacacggaatcactggagtatggtgcgcatctggtgccagaaggtggcttgcacagtatgccggtgcaatacgccggtaacggctggctgctggtgggcgatgcgttgcgcagttgcgtcaataccggaatttccgtgcgcggcatggatatggcgctgactggcgcgcaggcggcggcacaaacgctgataagcgcctgccagcaccgcgagccgcaaaatctgtttccgctttatcatcacaacgtagagcgcagcctgctgtgggatgttctacagcgttatcagcatgttccggcgcttttgcaacgcccgggatggtaccgtacgtggcctgcgttaatgcaagatatttcccgcgatttatgggatcagggtgataaacctgttccaccgctgcgccagttattctggcatcatttacgtcgtcacggcctgtggcatctggcgggcgatgttatcaggagtctgcgatgtctgtagcccgtaatctctggcgcgttgctgatgcgccgcacattgttccggctgactccgttgagcgccagacggcagaacggttgattaacgcctgtccggcaggtcttttttcgctcacaccggaaggtgacttacgtattgactatcgcagttgcctggagtgtggcacctgccgtttgctgtgcgacgaatcaacactacaacagtggcgctatccgccttccggattcggcatcacctaccgctttggataaataataaggataatttatgcccctcttacacctgctccgccagaatccggtgattgctgccgttaaagataatgccagcctgcaactggcaatcgattctgaatgccaatttatttccgtgttgtacggcaatatctgcaccatcagtaatatcgttaaaaagattaagaacgccgggaaatatgcttttattcatgttgatttgctggaaggcgcgtcaaataaagaagtcgttattcagtttttgaaactggtgatcgaggcggacggcattatcagtaccaaagcctcaatgttgaaagcggcaagagcggaaggttttttctgtattcatcgcctgtttattgttgattcaatttcgtttcacaacattgataagcaagttgcgcaatcgaatccggattgtattgagatcctgccaggctgtatgcccaaagtgctgggctgggtgacagagaaaatccgccaaccgctgattgccggtgggctggtgtgcgatgaagaagatgcgcgtaatgcgattaacgcgggtgtcgtggcgctttccaccacgaataccggggtctggacgttagcgaaaaaattactttgacgggataatcgtaaccaattgaatttggtttgatttgtaggccgcacgccacatccgacattcagcgcctgatgcgacgcttgacgcgtcttatcaggcctacaagtccccaggccagaaccgtaggcaggatcatccggcaacacgttattggcaatctgcgtgaatgtttgtcaccagtgcctccagcaccactttccagtcatcaaccacgccaacatctgcctgtgaaaataccgcagcgctggcgtcatgattaatcgccaccacaaacttgctattgcgtacgcccgccattaacgctgctgcgccagaagcgccaacaacaatacacacctcaggtgccagcagatgtccggaaataccaatcactttttcagcatcaacgccaccgttcatcactcgcgcccgactgtagcccacttcggctcccagcttttctgccagcatagcgatttcctggttatctgcctctccgccctgccccaccaccagcacccgtctggcctcagctaatgggtcgcgggtaacatttttcagatcctctgtgctaaccagccagtccggaagcgcacccgggacaatgttcagttgttgcattccagagggcaacgtggcgtttttcgctgctcccgcctgacgcgccagggaaaggcatagcgggcgtttttctgtttgcagcgtcgccgttagcgcatttccccagtgggatttgcgcacgcttacggttggaatatctaacgaagtcacctggcagatgcttgcaccatgtaaacgccaggccagccgggtcgacagttcatcgccaaacgttcccggcggaaagagaacaacgtccgcaggcgttcgctgccactgttccaccaacgcatccagcacctgttccgccactacaggctgaggttcaatctgccagtgcgccagggtacaaccgctgaaatcctgcgccgccagccagcttgctattgcggcattctcctgatttattgtcacaattgcgatattcatggctgcatcctttggcgtaaatagtcctgccatagcttttgagctttttctgctaccgtttgcccatcaatcagcgtcgctccgcgtcgttgctctgctcttgccagttgcagacactgcatcgctggcatttcggcagcaacagttttacggataatttctgctttccccgcagccattcgctggcgcattcccggtactggcaaggccacttcaccgcactgacgcacggcaatcaccgcaggcaagcgaacccggcaacaacgcaacccatgttcagtacgctgttcgagggtgataaacagcgcgtcgagagtgaaacgctccacctgggtgaagcagggccagcccagcatttccgccagcaaaaatggcgtttgcccattctgcccttcgctgctttggcagccggtaattatcagatccagcggattctgatgctgccattcggcaatatggcgagcgacaaattccggcgcaaagcgcagatctgccgccgtctccagcaatacagcttcctcaaacccaagagccatgagatagcgcagccagtgcaatgcccgttcatcccccatgctcaacgcggttaaagacatcggcgtaccgttttttctctgcgccaacagcagcgcggcagcggcctgttcatcagcaccgagtaaacttcgcagtagcgaaatatccggtccgcttttaccctgagccgccgcctgccactctttttccgccagcattccggcatccggttcggctttaaacgctaacagaatgttcattcgcacctcctacatttcccgccgccaccagcgggagggctttagtttctggtgcccatagccaggtcacaacaaaaccaaccaacaacactgtcgccaggagcaataaggtgacttgcattccccactgcgccagcacccacggcagcaggccagtacttaccgccgcgccaagtcgactcatggcagtggcaaaaccgacgcccagcgagcgaatgtcagtaggaaaactttccgcaggcaaaatgcccaccagattactgactgccgaaatggtggtgctgaagagaacaaaaagcagcagcgttaatgaactgccggaaggcaaacaggccatgactaccagcgttgccgccagcagcaaaaaacttcccagcaaaaatttgcgatgtgccagcaggtgcgtcagaactaatcccagcagcgcgcccacaattaacaacgcattaagcatcaggctggcagtcagcgcatcttccagaccaatagtctgggcgatagttggcagccaggtataaatcacaaaccatgggattacgaggcagacaaagaagacgctgttaaacgccgtgcgccgccagtaacgcgaagagaacaaggttttgatgtgtttatgggtcgccgttaccacttcatcgcccagtaaaacatggggaccaaaatagcgatgcacgatagcgtgagcttctgcaaaacgcccctggcgcagtagccagcgtggtgattctggcgttccccagcgtaataacgtaatcaacaacgcgggcagagctgccgatgccagtagccagcgccaggcctccgggttttcggaaataaagtgatgtccggcaatacttgccagcacatagcctacggtccacaccacgctgaatgcgcccagcaaaataccgcgatggcggcgcggggaaaattcagccagcaaggtgtgacctactgaataatcgcctcccagaccaatgccaatcaaaatgcgcagtccaataagatgctctggcgtggtggcaaaaaattgtaaaaacgaagcaagcgtaatcagcaaaaagctgaaggtgaagattttttgccgaccaatatggtcggagatccacccaagaaccaggctgccaaggaacaaaccaaggagcgccgagccgccgatcattcccgccataaacggcgtcagttgcatggcgggcgtaagctgaataatggcgtaaccaatgacgccgagaacataaccgtcggtcaggtgtgcgccgaaagtgagcgcagcaatgcggcagtgaaaacggttaagcggtaaatcatccattcgcaccggtgaagtgttcatctttaccccttcattgtccggtaataagaacggcttctcgcctgagaagccgaaaaggcaacgccccgtcatcgcggaacgctgcctgacacattatttttcaatcggatagatagtacccgtattcataatgccattaggatcgaactgctttttcagcccttccagcaacgcccacgcgctgccgtgttccagtttgctccagtgaacgcgatgtttaccgataccgtggtggtgcaccatcgaaccgccgaggcgaatggtttcttcacagatgatcttgttgagcggattgtggtacttgtcgatttcctcttccggcttacagtcaacgacgttgtaatcgtagacgaagtacatgttggtgccgttctgatagctatgagaggaatgaccgcccagcatggtgatgtcgtcggcgtgcgggaactcagtacgaatacggttaataacgctttcgtagatttcgtggatgcagctccagcagccggatacttcggtggtaaagcccatgttgccggttttgaggatctgcacacgttcggcagccactttatccggtccccagttcaggttgttaaaccaggtttcgatcagcttgctgtccacgcgctggcattgcgggtagcgggcaacgatttccgcaatcccttcgcccgtcaccttcgcaatgcgagggttaccttcagccataaagatcagcacgcattttccgtcggcaaaatgggtgaagtgttgggtgccatcttcagcgtcatacaaacgagcgattgacggacgatacccttccaccatgatttcacgcaggatgttgaagccggttttcatgtcttccaggatatagccgtagaagaggttgttttccggggtgaatttaaagattttcactgttacttcagtgatatagcacaatgcaccttcgttgccgatgatgatgtgacgaatgtccgggccagccgcgcggcgtggcacgtttttaatgcgtgtgacggtgccatcagccaatactgcttccagaccaacgaccatatcttcgattgcgccgtagagtgtggagaactgcccgatacttcgggttgctaccaggccgcccatctgcgccagcggctttgactgcggagaatgccccgtggtgtaacctttttcacgcaacgcgttttccagcacttccagcggaacaccacattgcgccgtcgcctgcatattctcaatatcaatattaatgatttgattcatggcggagccgtcgagcaccaccgagttttctacaacagtttccagcccaccttcggtggcggaagcaccggtacgcggcacaccgttaattttgtgcgcattcataaaattcagcacacgggatacttgctctgtggaaccgagttttacgaccgctgccggaatcggcaaagtataaatgccatgaatatccggaaatttacgaaaacggtcaatactgtttttctttaatactgtttcatcggtaattacgcgatctgcaccaacaatttcctttagctggtcgacaatcgctgcgcgagataaagacatagtaattccttcctgataataaaaatggaataatcattaataagagaaaacagaaaccaccgttatgggttagcgcactaaataaccgccatcaaccactaataaatgcccgttgacataattcgatgccggacttgcgaggaatacggctgcgcccattaaatcctgagtatcgccccaacggtttgccggaatatgatcaagaacgcgctgattggtttctggattactgcgtgtcgccagcgtaatatctgttgcataatagccaggggcgataccatttacctgaatattatattgacctagttcatcacaataagctttggtgaacccggcaagagcatgtttagtggcagaatatgcaggtgaccattgtccacctaagtaagagaacaatgaacagatattaataattttgccgcttttctgcgggatcataatttttgcagcttcatagcttaactcgaatgcggcggtcaggttcacatcaatcatcggatcccagtcggcacgaccgaagtccagcaccttattcagcttacaaataccggcattgttaaccagaatatcaactgtaccgaaacgctcacagcaagcagcgataatcttctgcggcgcgccttctgcggtgatatccacctgcatgaagtccacctcaacaccctgtttttcaatcatttcctttgtttcgccgttatctttgacgaaactaggaataaagatatttgcgccagctttggccaacgccatggcaaatgcctggcctaaaccgctattcccaccggtaacaattgcggttttacctttcagggagaaaaaatccattgagaacgcattgagagattcgattgacatagttagctccaatttccgtaaggcaaaaaaaaagaaaggtaacttcccccgcgagagggaagttacctttctcattatctctggtaactggagataatttttagcataagggcataactgctaatgtgatcgtaatcacagtgtgatattcgtattatcaaataattttaaaaagcagaagcgtgattactctcacacaacacctctgctttccatgttatttattatttcaattactagagacctgagaaaagtaatccacctgaaagggcggcttacttttctcttttttttgtctattacaaatgggaatacgatatgcaacacaactcatatcgccgttggataaccctcgcgataattagttttagcggcggcgttagtttcgacctggcttatttacgttatatttatcaaattcccatggcgaaatttatgggattcagcaataccgagataggtttaataatgagtacctttggtattgcggccattattctttatgcccccagcggcgttattgccgataaattttcacaccgcaaaatgattacttccgcgatgatcattaccggattactgggtctgttaatggcaacgtatccaccgctgtgggtaatgctctgtattcagatcgcctttgcgataacgacgattttaatgctgtggtcggtgtcgattaaagctgcatcgttgcttggcgatcatagcgagcaagggaaaattatgggctggatggaagggctgcgcggcgtcggtgtaatgtcgctggcggtgtttaccatgtgggtcttttctcgctttgcaccggatgacagcaccagcctgaaaacggtcattatcatctatagtgtggtttacatcttgttggggattctgtgctggttttttgttagcgataacaacaacctgcgcagtgccaataacgaagaaaaacagtcattccagcttagcgacatcctggccgttttgcgtatcagcaccacctggtattgcagcatggtgatttttggcgtcttcaccatctacgccattctgagttactccaccaactatctgaccgaaatgtatggcatgtcgctggtggcggcgagctacatggggattgtgatcaacaaaatattccgcgcgctgtgcggcccacttggcggcataatcaccacctacagcaaagtgaaatcccctacccgcgtgatccaaatcctttccgtactcggcctgctgacgttaactgccctgctcgtcacgaactctaacccgcaatcggtcgcgatggggattggcctgattttactgctgggattcacctgttacgcctcacgcgggctgtactgggcctgccctggcgaagcgagaacaccgtcttacattatgggcaccacggtaggtatttgttcggtgattggattcctgccggatgtcttcgtttacccaattatcggccactggcaagacaccctgcccgctgcagaagcctaccgcaatatgtggctgatgggcatggcggcgcttggcatggtgattgtctttacctttttgctgttccaaaaaattcgtactgctgatagcgcccccgcaatggctagcagcaagtaagccaggaaaattacaggagaaaaatcatgtcgaaaaaatacatcatagggattgatggcggaagtcagagcacaaaagtggtgatgtacgatctggaaggtaacgtggtttgcgaaggcaaaggcttattacagccgatgcacacgccagatgccgatactgcagaacatcctgacgacgatttatgggcatcattatgttttgccggtcacgatttgatgagtcagtttgccgggaataaagaagatattgtcggtattggtctgggatccatccgttgctgccgtgcgttattgaaagccgatggcacgcctgctgcgccgttgattagctggcaggatgcacgcgttacacgcccttacgaacacactaaccctgacgtggcatatgtcacctctttttcgggttatctgacgcatcgcttaaccggcgagtttaaagacaatatcgccaactattttggtcagtggccggtggattataagagctgggcatggagcgaagatgctgcggtaatggataagtttaatatcccccgtcatatgctgtttgatgtgcaaatgcctggcaccgtcctcggacatatcacaccacaagccgcactggcgacacatttcccggcaggactgccggttgtttgtaccaccagtgataaaccggtagaagctctgggggccggattactggatgatgaaacggcggtaatttctcttggcacttacatcgcattgatgatgaacggcaaagcactgccgaaagatccagtagcgtactggccgattatgtcttctattccgcaaacattgctgtatgaaggttacggtattcgcaaaggcatgtggacggtgagctggctgcgcgacatgctaggcgagtcgttaattcaggatgccagggcgcaggatctttcaccggaagatttactcaacaaaaaagcttcttgtgtgccgccaggctgtaatggtctgatgacggtgctggactggctgaccaatccgtgggaaccgtacaaacgcgggattatgatcggctttgattccagcatggattacgcatggatatatcgttcgatactggaaagcgtggcgctgacgctgaagaacaattacgacaatatgtgtaatgaaatgaatcactttgcgaagcatgtgatcattactggcggcggttcgaacagcgatctgtttatgcagatttttgccgacgtgttcaaccttccggcacgacgtaacgccattaacggttgtgcaagcctgggggcagcgattaatacagcggtaggtctggggctatacccggattacgcaacggctgtcgataacatggttcgcgtgaaagatatctttataccgattgagagcaatgccaaacgctacgacgcgatgaataaaggcattttcaaagacctaaccaaacatactgatgtgatcctgaaaaaatcgtatgaagtgatgcatggggaattggggaatgtggattcgatccagagctggtcgaatgcgtaagtgaggaaggccgggcgggaaactgcccggcctgaacatacctgaatggttatccccgctgacgcggggaacataagttcgacaacttaaaaaatgataacaagtccggtttatccccgctgatgcagggaacataataaaaactttaactagttcggtttatccctgtttttacaaggaatattaactacactcgatgtctttagaataaaagacaatacgaatcgcactttatcaattttcacttaaagtatgaactggatatctttattcataagaactattcatcaacagcgtatagaggcggttatgtaaaaccactcattagcctcaaaacaaagacaaacttccagatttattacttaaccaatgaataacaagcttaaaaaatatactgttattctaaagaaaaaattaacaggcattaattcaatattaaaaaaataatagattaaaatttcttaacgatttaagaatcatacaaataacactttgattaaatttaattttttgtatcgataattgtgaacctctctggcatggagaactattttgaacatgaggtgttacgtggatatgttgcttattacaagtactgctaatataaaaacttgagaaagagataacgggttatatggtggtttatccccgctggcgcggggaactcgacagaacggcctcagtagtctcgtcaggctccggtttatccccgctggcgcggggaacacctgttttcgcaaatctatggactattgctattcggtttatccccgctggcgcggggaacacgggcgcacggaatacaaagccgtgtatctgctcggtttatccccgctggcgcggggaacactggctctgcaacagcagcacccatgaccacgtcggtttatccccgctggcgcggggaacacgaaatgctggtgagcgttaatgccgcaaacacaggtttatccccgctggcgcggggaacacattacgcctttttgcgattgcccggtttttgccggtttatccccgctggcgcggggaacactttgccacccgagtccataaattcttgatatgcggtttatccccgctggcgcggggaacaccctcatgtggattatattaatattatgggccgcggtttatccccgctggcgcggggaacactctaaacataacctattattaattaatgattttttaagccagtcacaatctaccaactttatagtatcacacaaacaacacatccattatgttaaagagcacttaatccattgattaaaaaggtaaatatttaaaataactctatacaaactaaaatctaccaaactttaccgcaataattttcactccagcgaaaaattaatgccacagaatttgtagagaatgctaatgattagccctggatgggtaaaatggaggagttttcagaggcgacaaacaatataaatgagtagaagtctttacaggttccacccatttataacgcttataaatgtttaatcaggcaatatttagatatttatgtgtttgcatcgacaaacgccaattacgcgcaatgcaggtttcaatgcacaaacgtgtggcatcatccttttggctaatcggctgcagtgcaatgactcgcggtttatcatcggtcagcgttgccagtagttcatccagtgcttcaatatcgcgtacgcgccccactggatgcttgatttcgttggctcgctccagtgcctgtgacaacacttcatagccgccgcgcatgttcagctttggcgatacggtaacccaggtattcggtgtgcagcgtacctcatgagtaccactggtttcgatctggcagctaaaaccgttcttttcgagcagatcagtcagtggcagcaaatcatgaatgcaaggctcaccacccgtaatcaccacatgccgcgcggtgtatccctggcgaccaatgacagccagcaaatcttcactgctcgcagccccccacttatcactctctttggtcttcgccagaatgctgaaaagggagacttcccgatcctcaagcttttcccaggtgtgtttggtgtcgcaccaggcacagccaaccgggcatccctgtaaacgaataaaaatggcgggaacgccggtaaagtaaccctcaccttgcagggtctggaacatctcgttaatcgggtactgcatagcattctctgtgaagtggataattgttaattattgcagatcctgccacaacaatcatgtcttattaacattctgttacaggcaggtttaaagaaaaatgcgaaacatatcgttaataattaaagggagtaacgtattatgtcagaagaaaataaagaaaatggatttaatcatgtcaaaacattcaccaaaattatatttattttttctgtattagtttttaatgataacgaatataaaattaccgatgccgccgtcaatttatttatccagatttaatgagaaatttataatgcgctatttcatactaatgttcactttcgtatgttcctttgttgcagcccaaccaactattgtcccacaattacagcaacaagttacggatcttacgagtagcttaaactcacaagaaaagaaagaactgacgcacaagttagaatctattttcaataatacccaagtgcaaattgccgtattaattgttcccacaaccaaagacgagacaattgaacaatatgctacaagagtttttgacaattggcgtttaggagatgccaaacgtaatgatgggatactgatcgttgttgcctggtcggatcgcactgtccgcatccaggtaggttatgggctggaagaaaaggtaaccgatgctctggctggagatatcatccgtagcaacatgatacccgcatttaaacaacaaaaattagctaagggattagagctagctataaacgctttgaataaccaactcacttcacaacaccaatatccgactaatccttcagaaagtgaatcagcgtcttccagtgatcattattactttgctattttttgggtatttgcagtgatgttcttccctttctggttttttcatcaaggcagtaatttttgtcgcgcatgtaaaagtggagtctgtatttcagcaatctatcttttagatttattcctgttctccgataaaattttttccattgctgtattttccttcttttttactttcaccatatttatggtctttacctgtttatgtgtacttcagaaaagagcatctggtagaagttatcattcagacaacagcggttccgctggaggctcagatagcggcggatttagcggcgggggcggttcttctggaggtggcggcgcatccggccgctggtaactcaaccataaaaaatgccagcccggaggctggcatttttaaatcagataaagtcagtcttatgcctggcctttgatctctttacgaccgttgtacggtgctttttcgcccagagcttcttcgatacgaatcagctggttgtatttagcaacacggtcagaacggctcatagaaccagttttgatctggcctgcagcagtaccaacagccaggtcagcgatggtagcgtcttcagtttcgccagaacggtgagagataactgcagtgtagccagcatctttcgccatcttgattgcagccagagtttcggtcagagaaccgatctggttgaatttgatcaggatggagttagcgatacctttttcgataccttctttcaggatcttggtgttggttacgaacaggtcgtcaccaaccagctggattttgtcgcccagaactttggtctggtatgcgaaaccgtcccagtcagattcgtccagaccgtcttcgatagaaacgatcgggtactgtttggtcagttcttccaggaagtgagtgaattcttcagaggtgaacgctttgttgccttcgccagccagaacgtatttaccatctttgtagaattcagaagctgcgcagtccatcgccaaagtgatgtctttgcccagttcataaccagcagctttaacagcttcagcgataacagccagagcttcagcgttggaacccaggttcggcgcatagccaccttcgtcaccaacagcagtgttcatgcctttcgctttcagaacttttgccaggtgatggaaaacttcagaacccatgcggatggcttctttcacagttttcgcgccaaccggctgaatcatgaattcctggatatcaacgttgttgtcagcgtgctcaccaccgttgatgatgttcatcatcggaaccggcatagagtatttgcccggagtaccgttcagttcagcgatgtgctcgtacagcggcatacctttagcagctgcagcagctttggcgttagccagagatacagccaggattgcgttcgcgccgaatttggatttgttttcggtgccgtccaggtcgatcatgatcttgtcaatgccagcctgatctttagcatctttgccaatcagcgcctgagcgatcgggccgtttaccgcagcaacagctttggttacgcctttacccaggaaacgggatttgtcgccatcgcgcagttccagagcttcacgggaaccagtagaagcacctgacggagcagctgccataccgacgaaaccaccctccagatgtacttcggcttcaacagtcgggttaccacgggagtcgatgatttcacgaccgatgatttttacgattttggacattaggttttcctcaagtcactagttaaactgaaactccagacaaacaacgcgtacccagggtacgcgttgccgctctaacttttttacttacttcgcctgacgtttctggaactcgctggcggctttcacaaagcctgcaaacagcgggtgaccatcacgtggagtagaagtaaactccggatggaactggcaagccacgaaccacgggtgattcggaacttcgatgatctcgaccaactgatcatccccggaacggcccgcaacgcgcagacctgcatcttcaatctgtttcaacagcatgttgttgacttcgtaacggtgacgatgacgctcaacaattgtcggcgcattgtacagctggcgaaccaggctatcgtcaaccaactggcactgctgtgcgccgagacgcatggtaccgccgagatcgctcttctcgctacgaacttcaacgttgccgttttcatcgcgccactcggtaatcagcgccacaaccgggtacttacagtctggcacaaattccgtagagttggcgttctccatgttggcaacatggcgagcgtaatcaattaacgccacctgcatacccaggcaaatgcccagataaggaatattgttctcacgcgcaaaacgcgcggtcgtaatcatgccttctacgccacgatagccgaaaccgccaggtacgaggattgcgtccagacctttaaggatttcaacgccgcgcgtttcaacatcttgtgaatcgatcagtttgatgttgacgctgacacgattcttcagcccaccgtgtttcagtgcttcgatcactgatttataagcatccggcagttcaatgtacttgccgaccataccgatggtgacttcacttaccgggttcgcttcttcgaagataacctgttcccattcggacagattcgcttccgggcagtttaagctgaatcgtttacaaatataatcgtccagcccctgagatttcaacaggcccggaattttatagatggaatcgacgtctttcagagaaataaccgctttttccggaacattacagaacaatgcaatcttcgcacgttcgttcgccggaacagcgcgatctgaacgacaaatcaggatgtcaggctggataccgatggagagcagctcttttacagagtgctgagtcggtttggttttgacttcaccagacgctgccatgtacggcaccagcgtcaggtgcataaacagagtgtgctcacggccaatttcaacagccatctggcgaatcgcttcgaggaacggcaaggattcgatatcacctactgtaccgccgatttctaccagtactacgtcatgaccttcgccaccttccagcacgcgctctttgattgcgttagtgatgtgcggaataacctgcacggttgcgccgaggtagtcaccgcggcgttctttacgcagaacgtcagagtaaatacgacccgtggtgaagttgttgcggcggctcattttggtacgaatgaaacgctcgtagtgccccaggtccaggtcggtttcagcgccgtcttcagtaacgaacacttccccgtgttggattgggctcatagtacctggatcgacgttgatgtaaggatccagtttcatgatggtcacattgaggccacgggcttcaagaatggctgcgagggaggctgcggcaatgcctttacccagagaggatacgaccccgccggtcacaaaaatatagttcgttgtcatgctgaacctgagaagttaggttgaaaagacgatggaataaccaagacgggaaagcagtatacccgaacatgacctgtgccacaaactttcattatccctcctcttcgccagcgcactattgaaatcaggagtgagaaaatagcccctttggggtaaatgtttttgacgcaaatcaagcgcttgtcatttaaaaaatgacacaaatggcgcttgaccgcgtaattcccttagagatcaatttcctgccgttttacctgttgccagacttcttccattgtttcgaggtcaacacctgtcatttccagtccacgcgcggcaacaatacgctccacttcgcgaaaacgacgctcgaatttttcgttcgctttttgcaatgcgatttctgctttcgtccctaaatggcgagccagattaaccgtggcaaacagcaggtcccccatttcctcctccagtttagcctggtcgacaacagcctgccgcgcttcgtacatcacctcgtcgatctcttcgtagactttatcgactaccggaccaagcgtcgtccaatcgaagccaacgttggcgcaacgtttctggattttttgcgcacgcattaaagccggtaaactacgaggaatatcgtccagcgccgaatgctgcgctttctgcgcgcgctcttcggttttgatttgctcccaacgggcaagcacttcactactgttttcggcagaactatcagcaaaaacatgcggatggcgacgctctaatttatcgctaatagcagcgcaaatatcattaaagtcaaagcgcccttcttcctgagccatttgcgcgtaaaacaccacctggaatagcagatcgcccagttcaccgcgaagatcgtcaaaatcttcacgggcgatggcgtccagcacttcgtaggtttcttcaagggtgtaaggcgcaatggtggcaaatgtctgctctttatcccacgggcagccgttttccggatcgcgcaggcgctgcataatagtgagcaaacggtcgatttgattcattgaattgtcctgaaaattgcgggtctgtcaggtggaaacctgtgaccagaatagaagtgagttagtaacactacccaatcagtacgttaattttggctttaatgagttgtaattcctctggggcaactgttcctttcttcgttgctcctcttgcccgccaggcgatactttttacctgatcagctaacgctacgccatcacgttcctgaccggataaaacaacttcgaacggatatccttttgattgcgttgtacaaggaacacacagacacatacctgttttgttgttgtacatgaaaggactcaggacaacagctggacgatgtccagcttgctcgctaccttttgtcgggtcaaaatcaacccaaatcagatcgcccatatcgggtacgtatcggcttaccattaccagacttccttatctttcggctctccccagtcgatattctcgtggaggttttccggcgtgatgtcgttgaccagttcagcaagcgtaaatacgggctctttacgcactggctcaataattaatttgccatccaccaggtcaatcttcacttcatcatcaatattcagattgagcgcctgcattaacgtagccgggatccgcaccgccggtgaatttccccaacgctttacgctactgtggatcataaccctttcctcaaaccgctatcatatgtagatacagtatatatcaatctacattgtagatacgagcaaatttcggcctaactcccgtgcaaccgacgcgcgtcgataacatccggcacctggttgagtttacccagcacgcgccccagcacttgcaggttgtaaatctcaatggtcatgtcgatggtcgccagttgctgtttggtgtcgctacggctggcaacgccaagcacgttcaccttctcgttggcgagaatggtcgtgatatcacgtaacaacccactacgatcattagctaccacgcggaccaccagcgaatatccggcggagtagctctcaccccataccgcgtcaacaatgcgttctggcgcatgggagcgcagttccgccagttgttcgcaatcggcgcggtgtactgaaataccgcgcccctgggtaatgaagccgacaatctcatctccaggaatcggctggcagcagcgcgcgatgtggtgcatcaggttgccaacaccttcgactaccacgcgaccgttatctttactgcggttttgcggcgtgtagcttttttgctgaagttgcttcagcgcggcggcgtcctgctcttcggcactcggcttattaaattgcgattgcaggaagttcaccatctgattgagacggatatccccgccaccaatcgccgccagcaactcgtcgacatcattgaagttgtaacgcggcagcagatgtttttctgcttctttcaggctgatccccagatgttccagctcgtcgtcaaggatttgccgcccagccagaatgtttttgtcacggtcctgtttacggaaccaggcgtgaattttcgaacgcccacggctggttgtgacgtaaccgaggtttgggtttaaccagtcacggctggggttcggctgtttctgggtgataatttcaatctggtcgcccatctgcagctggtaggtgaacggcacaatgcgcccgccaatttttgccccgatgcagcggtgtccgacatcactgtggatgtggtaagcgaagtccagcggcgttgatcccgcaggcaaatcaacgacatcacctttcggcgtaaagacgtacacccggtcgtcaaagacctgactacgtacttcgtcgagcatttcgccggaatcagccatctcttcctgccacgcaatcagtttacgcagccaggcaatccggtcttcatgtcccgaacgtgcgccgccagcagccgcgccctctttatatttccagtgcgcagcaacacccaactctgcatcttcatgcatctgtttggtgcggatttggatctcaacggtttttccacccggccccagaaccacggtatgaatagactgataaccgtttggtttcgggttagcgacgtaatcgtcaaactcatccggcaggtggcgatagtgagtgtgcactatccccagtgcggcatagcaatcctgtaaacgctcggcgacaatacgtaccgcacgcacatcaaacagctcatcaaaggcgaggttctttttctgcattttacgccagatgctgtagatgtgtttcggacgaccatacacttccgctttaacgccttcagctttcatctcagcgcgcagatgaccaacgaactcttcgatgtagtgttcgcggtcgagacgccgttcatgcagcagtttggcaattcgtttgtattcggttggatggaggtaacggaagcagtaatcttccagttcccatttcagttgtccgattccgagacggttagccagcggtgcgtagatgttggtacactcttttgccgccagtacacgttcatcttccggcgcatcttttacttcgcgcagatgagcaatacgctccgccagtttgatgactacgcagcgaaaatcatcgaccatcgccaataacatccggcgaacgttatcgacctgttcggaggaaacagaatcagtgtgcgtcgctttcagctggcggatcgccgccatatcacgcacgccgtgaataaggttaacgaccgacttaccgacgctctcacgcagcacatcttcgctgactacgttggcatccgccagagggaaaagcagcgccgcccgcagcgtgtcaatgtccatacttaatgtcgagaggatctccaccatctcaacaccacgccacaataacagactggcatccggatgcccctgcgtctgttgcagacaatacgcccaggtttcggctaagcactcacacgacttctggctggtaatacccagacttgcgatccatttttccggatcaaattcaccagccttattgatatgtgcacttcttaccgcaaccatcgtcctctcctttagggaccagacctgccgaaatcggcaaatcgcaactatttaacgcgcgagaaaagtaccatcgattccagatgtcccgtgtgtgggaacatatccagcatcgccagtcgcgcaatggtatatcctgcttttaataacgcttcgctatcccgagccagcgttgcagggttacaggatacataaactatacgaataggttccagttttataatttgctgcataacacctgcggcacctgctcgcgccgggtccagcaacactttatcgaagccgtttttcgcccacggctgctttgtgacatcttcttcaagattttcgtgataaaacgtcacattctgtaagccattaagacgcgcattctgctggcctttttccaccagcgccggaacaccttctacaccgaccacactggcagcttgtgtcgccaatggcagtgtaaagttgcccataccgcagaacagatccagtacgcgatcttcaggttgcacatccagccattccaacgcacgcgctaccattttttggttcacacccgcattgacctgaataaaatcgcgcgggctaaaagttaagcgcaacccgtttgagtcataccagggcatctcaccagagacggtttcgagtatctcactatcgggggcgagatacagatccaggccttcagaatgcgaaaagcgttccagtttttcgcgatctgccgaacttagcggtgcggtatggcgcaaaatcatcagcgtgccgctggttgcctgtaccagttcaacatgaccaagatggcgcatagcttgtaagctgcccagacatgccctgactttgggcagcaatgcttcaagttggggcgctaaaatggggcattgtttgacgtcgacaatgtcactggagcccgctttgcgaaaccccatctgaagttgctgtgttttcggtaagtagttcagacttaaacgcgcgcgacggcgatagccccagggaacatcggcgatcacttcagagacatcgtgtttcattaatcgggcgagtgccgcacttttgcttcgctgctgtaaatccacgctggcgtgttgttgctgacagccaccgcatacgccaaaatgaggacagcgtggcgtttcgcgttccgggctatcgcttaaccggcgtacgactttagcgcgggcatactgttttttatcttcagtaacagtaacttccgcgttttcctgcggcaataatccggggataaatagcgttttgccgttatgtcgcgccacgccctgaccaaaagagtcgaggtcgttgactgaaacggttatgatctgacgcgtcgtcgtgcgtcgttttgcagagtagaattgcgccattggcgagactttctcaatttaacagtgtgaccttaattgtcccataacggaactccatgaccaactacagcctgcgcgcacgcatgatgattctgatcctggcaccgaccgtccttattggtttattgctgagtatctttttcgtcgtgcatcgctataacgacttgcagcgtcaactggaagatgccggtgccagcattattgagccgcttgcagtttctactgaatatggcatgagcctgcaaaatcgcgaatctatcggtcagttaataagcgtactgcatcgtcgccattccgatattgttcgcgcgatttcggtttatgatgaaaataaccgactctttgtcacctccaattttcatcttgatccctcatcaatgcagctcggcagcaacgtgccgtttcctcgccagctcactgtcactcgtgacggcgatattatgatcctccgcacgccgattatttctgagagttactcccccgacgaatcgcccagtagcgatgccaaaaatagtcaaaatatgttgggatatattgcgctggagctggatcttaaatcggttcgcttgcagcaatataaagagatctttatttccagcgtgatgatgctgttttgtatcggtattgcgcttatttttggctggcgcttaatgcgcgatgtaaccggtccgattcgcaacatggtgaataccgtcgaccgcatccgtcgcgggcaactcgacagccgggtggaaggatttatgctcggcgagctggatatgctgaaaaacggtatcaactcgatggcaatgtcgctggctgcttatcacgaagagatgcagcacaatatcgaccaggcgacgtccgatctgcgtgaaacgctggagcagatggaaattcagaacgttgagttagatctggcgaaaaagcgcgcccaggaagcggcgcgtattaaatccgagtttctggcaaatatgtcacacgagctgcgtacaccactgaatggtgttattggctttacccgcctgacgctgaaaacagaattaacaccaacgcagcgcgatcacctgaatacgattgaacgttcggcaaataatttgctggcaattattaatgatgttctcgacttctcgaaactggaagcaggtaagctgattctggaaagtattccattcccactacgcagcacgctggatgaagtcgttactctgctggcacattcttctcacgataaagggttagaactgacgctcaatattaaaagcgacgtgcctgataacgtgatcggcgacccgctgcgattacagcaaatcatcactaacctggtggggaatgcaattaaattcaccgagaatggcaacattgatattctggtagaaaaacgtgcgctgagtaataccaaagtgcagattgaagtgcagattcgggataccggcattggtattcctgaacgcgatcaatcgcgcttattccaggccttccgacaggctgatgccagtatttcccgccgtcatggtggcaccgggctggggctggtgattacacaaaaactggttaatgaaatgggcggcgatatttcgttccatagccagccgaatcgcggttcaactttctggttccacattaatctcgatctgaacccgaacattattatcgaagggccatccacccagtgcctcgcaggtaagcgcctggcctatgtcgaaccaaactccgcagcagcgcaatgcacgctggatattttaagtgaaacgccgctggaagtggtttatagcccaacgttctccgcgctgcctcccgcgcattacgacatgatgttgttaggcatcgcggtgaccttccgcgagccgctaacaatgcaacatgagcgattagcgaaagcggtatcgatgaccgatttcctgatgctggcacttccttgccatgcacaagtcaatgctgaaaaactcaagcaagatggtatcggcgcgtgtctgctgaaaccattaacacctacacgcctgttgcctgccctgacggaattttgtcatcacaaacaaaacacgcttttgcctgtaaccgatgaaagtaagctggcaatgacagtcatggcggttgatgacaaccccgctaacctgaaacttatcggcgcattgctggaagatatggtgcaacatgtggaactttgcgatagcgggcatcaggcggttgaacgggcgaaacagatgccgttcgatttgatcttaatggatattcaaatgccggacatggatggcattcgggcctgcgaactcatccaccaactcccgcatcagcaacaaacgccggttatcgcggtaacggcgcatgcaatggccgggcaaaaagagaagctgcttggcgcagggatgagcgattatctggcgaaaccgattgaagaagagcgattgcataatttgttgttgcgctacaagcctggcagcggtatttcctctcgcgtcgtgacgcccgaagtcaacgaaattgtggtgaacccgaatgcgaccctcgactggcaactggcactacgccaggcagcaggaaaaaccgatttagcgcgcgatatgctgcaaatgttactcgatttcctgcctgaagttcgcaacaaagttgaggaacagctggttggagaaaacccggaaggcctggttgatttgattcataaactgcatggcagttgcggctatagcggtgtgccacgtatgaagaatctctgccaactgatcgaacaacagctacgtagcggtactaaagaagaagatttggagccggagctgctggaactgttggacgagatggataatgtcgcgcgcgaagccagcaaaattctcgggtaacggacgtcttgtcgagtagcaatcggctttttatgacgctggtttcagattggtgacaaagtgcctgtgtttatgccggatgcggcgttaacgccttatccggcctacaaaaccaattaaattcaataaattaaaaagcatgtaggcctgataagcgtagcgcatcaggcaattttgtgtttggcatcagtctcaaaccggctcctgacagagccggttttggttttctgtcttaacgcaccatgcacgggcgcttgttatcgaacgtccagccaggaatcagatactgcattcccatcgcatcgtcacgcgcgccaagcccgtgtttctgatacagctcatgggctttcatcacttgatccatatcgatttctacacccagccccggtttttctggcacctgtaccagcccgcctttgatctcaaacggttctttggtcaggcgctgattgccttcctgccaaatccagtgcgtatcaatagcagtaattttacccggtgcagcggcggcaacatgggtaaacatcgccagggaaatatcgaagtggttgttagagtgtgaaccccaggtcaggccaaattcatggcacatttgcgccacacgtaccgaaccttgcattgtccagaaatgcggatccgccagcgggatatcaacggattgcagggagagcgtatggcccatttgccgccagtcggtggcgatcatattggttgcagtcggtagacctgtcgcgcgacggaactctgccatcacttcacgcccggagaaaccttgctccgcaccacacggatcttctgcataagccagcgaacctttcaggtatttaccgattttaatcgcttcgttcagcgaccaggcaccgttaggatcgagcgtaatacgcgcctgcgggaagcgttgcgccagtgccacaatagactcggcctcttcttccccggccagtacaccgcccttcagtttgaaatcgttgaagccatatttttcatatgccgcttccgccaggcgcaccaccgcatccggcgtcatcgcttcttcatgacgcaggcgataccagtcgcatgagtcatccggctggctttgatacggcagcggcgtggctttgcgattaccgacgaagaacagataaccgagcatttcgacttcgctacgctgttgaccatcgcccagcagcgatgccacgtttacccccagatgctgccccagcagatccagcattgccgcttctatcccggtaactacatgaatagtggtacgtaggtcaaatgtctgcaaaccgcgcccaccagcatcacgatcggcaaaagtattacgcaccagcgtcagaacgtttttgtattcacccagcgttttacctaccaccagcggaatcgcatcttccagcgttttacggattttctcgccgccgggaatttcccctacgccagtgtgaccagaattatctttgataatcacaatattacgcgtaaagaacggtgcgtgtgcaccactcagattcatcagcatactgtcatgacccgccaccgggataacctgcatttcagtaacaacaggcgtcgtaaattgagaactcatatttatgtcctttttcagaatcaatgacggccgaaaacgggacgtttacggtcaaaggtccagccggggatcaggtactgcatcggacctgcgtcgttacgcgcaccgccaggcagacgtttataggcctcatgtgccttttgtacctgttcccagtccagttccacgcccagaccgggcgcatcaggaacggcaatttttccgtttttaatctccagcggattttgggtcaggcgacaatcgccctcctgccaaatccagtgggtatcgatagcggtaggattacccggtgccgccgcgcccacatgggtaaacatcgccagagagatatcgaaatggttattagaatggcagccccaggtcagcccccagtcgtcgcaaagctgcgccacacggactgcaccggaaagcgtccagaagtgcggatcggcaagtggaatatctaccgcattgagcatcaccgcatgacccatttcgcgccagttggtggcgatcatgttagtcgcgacgggcaagccggtcgcccgtcgaaattccgccatcacttcacgtccggagaagccctgttctgcgccgcatggatcttcggcataggtaagaacatcattcagccctttgcataaagaaatggcttcatcaagcagccatgcaccgttgggatcaacggtaatccgcgcatccgggaagcgtttcttcaatgcacgaacagtgtcgatttcttgctcgccaggtaacacgccgcccttaagtttgaaatctttaaagccgtagcgatcctgtgaggcttccgccagacgcacaacggcttcgctgttcattgctttctgatgccgcaactgataccactcatggttgcccggcgtattttccacataaggaagatcggttttggtccgatcaccgatataaaacagataaccgaggacggtaatagcctcgcgttgcttgcctggccctaacagttcgcagaccggaacattcagcgccttacctagcaggtcaagcaaagcggcttccagcgccgccacggcgttaacgcgtaattcaaaggtccaggcacctttaccgaaggtatcaaaatcggcggcctgattacctttatgcacctgctggaccactttattcagtcgcgcaacttcctggcccagaaccatcggaatagcatcgacaagcgtctgataaatcacatctccgcccggcgcttcaccaatgccggtatgcccggcgttatcggtgagtaccacaatattgcgggtgaaatatgcgttatgtgccccaccaatattaagcaacatgctgtcatgcccggccaccggaatgactttcatatcagtaataacaggactggattgtgtcgccatcttattgccccgcaacaggtttcaactcgatacgcttgatatcgcccaccagcaccaggtagctcagtaccgcgattaaggcatgaacaccaacataaatcagcgccccattaaacgagccagtcgtgccaacgatataaccaattgcgattggcgtgacgatgccagaaatgttaccgaacatgttgaacaggccaccggaaagaccgctgatctcttttggcgcggtatctgccattactgcccaacccagcgccccgatgcccttaccgaagaaggccagcgccataaagccgatgatcatccactcaacgttgacgtagttgcagaacaccatcaccatcgacagcaacatgcccattacgatcggtgttttacgcgcaatgttcagcgatcccgtgcggcgcatcagccagtcggaaataatcccacccagcacaccgccgataaaaccgcaaaccgccggaacggaagccacaaagcccgctttcagaatcgacatcccgcgtgcctgcaccagataaaccgggaaccaggtaataaagaagtaagtcagggcgttgatacagtactgaccgatataaacgccgatcatcatccgtgaccctagcagctgtttgatctgcccccacttcacgctgaacggcactttaactttggtgttttgctgatccatattgatcagcgcaccacccgcggcgatgtactccagctctttcttatttacccccggatgttgatttggctcgtggatgactttcaaccagataaagctgatgacaatccccagaccgcccataaagaagaagacgtgtgaccagcccacttcatgcgtcagccagcccataatcggcgcgaagatcaccgttgcgaagtattgagcggagttaaaaatcgacaccgccgttcccctttcctgcgccggaaaccaggccgcaacaatgcgactgttgccggggaaagatggcgcttcagcaagcccgaccaggaagcgcagcgtaaacagggcaacgataatgccgaatccactaaagatatcgacgaagccttgcagcaaggtaaacatcgaccagataaagatcgaccagaagtagacgcgttttgaaccaaaacggtccagcaaccagccaccagggatctgcccgataacataagcccatgagaaagcagagaacacatagcccattcccacgggatcaaggccgatatctttggccatttccgaaccggcgatagagagcgtagcgcggtcgccgtagttgaaggatgtgacgataaacaacatcaccactatccagtaacgagcatttgtgcgtttttccacactgctcgcagcctgacttaaagaactcattgttgcactcctgaaaattcgcgttagccacgctcactctggactgcgacatcgccaggaaatcagaggtgacgtagggtgttttttgccgtttttataggtcgttcgccgaatacggcgcgtgtttatatctggcaatagcagtataaaaagcgcgccatagcggctcaccgtgcaacaacacaacattaatgcgttcaatgaggcccgattttggcattagccctggacggtggaatccacttcacggaaatgaaaacaagaacaagaaaggaagggttaaaacgaagaaataaagaagagtatgaaatggatcgcttgactccaggcaaacgccagtaaaaatccgcgctatgaagcagtttttactggcatttgcctgaaaagattcgattcagcaccgctaaaacgacatttaccgctcgctgaacatatcaggacaacagcgtgccccactgttcgacccacggatttgattccgtttccggttccgggttctcactggcgtcaatcaacagcatttcgccaacccgctgagcgctctgttcctgcaacaaggcatcgaactgtttgccgccattgcagaaattcacataactactgtcgccgagcgcaatcacgccataacgcagattcggctggaagcccagactatctttgattccctgaaagagtggcacaatgctatcaggaaggtcgccctgcccggtcgtggacgtaaccaccagaacatacttatcctgatagggcagccagtcgcttaattcaggatcttcaaataccgttgctttgtggccctgcgcggtcagaatcgcttccgcttcttcggccactaacagtgaattcccgtacatggtgccgacaaaaataccaatttccgccataccgttttctccctggattaggaacttatctctccatcctgacccgatggcgcactgaactcaaccctttcattttcaggaagcagaccgcgccagccaaattgtgataacgcctgcatccaggtgtcgtccaggcccgcgtgaatagtcagcggctcgccagtaaaaggatgcgtcaatgacaactgactggcatgtagcattaaccgctggaggccaaaatgctcagcaccgctgcgattctggcgtaaatcgccatgtttgctatcgccaataatcggatgacgcaaatgggcaagatgtcggcgaagctgatgtttgcgtccggttttcggctccagttccaccaggccgtagcgcgtggtcgggtaacgtccggtcgctaccggcatttctacggtcgccagaccgcgataatgcgtcactgctggctgcgggcctttatcttcgcgggcaaatttatcagcgattttgtccagttcttccaccagtggataatccagcaccgcttcttccatcaaccagccgcgcacaatcgcatggtaacgtttctggatttggtgctgttcaaactgttgtgccagcagccgtccggcctcgctggataatcccatcaacaacacaccagaagtgggtcggtccagacgatgagcagtaaaaacatgctggcctatctggtcacgcacggtttgcatgaccactactttctcgtcgcgatccagccagctgcggtgaaccagccagccggagggtttatttaccgcaaccagccattcatcctgatagagtatttccagcattagctcgcatcatccgcaaaaagagcatccagtttttccagctcagccagaataagcgcgcgttgcggatggtccgtcgccagcgccatttcataatagggtgcaacggcaaaagcgcccggtaacggctgtttgttatctaacaaatcgtgcattcgcgggatcagcacccactgcaaccactccagtggttccatggtgtccataaagaacggttgggtactattaaattgatgcggctggggttcatcgtttcgccagtgctgatgttcacgcagtaacgcttcaagcgcctgcaactggagacgaacgcggtcatgagtggtcataaagcaacctcaataagaaaaactgccgcgaaggatagcaggaataaaaaaagggagcactgtattcacagcgctcccggttcgtttcgcagcattccagctacttttgttgctccctgctcatccttgacaacttttcctctggccttgcggccaatcgttcatcctgaactattgcttcctgctcacaccaccccgatgtgatacttcatcctgaagtgtccctggccttcctgacccaccgaatcatcctgaccggttctcattctccatcctggaggtgtcctttaacgcgtcctgcgtcatcctcttcgcttcatccagaagcctttccctgaaacaccatcctggtgtgtcctgcagaagtgtcatcatcctgatgttcacttcgttgtctgactccctgtcgacgaagatagaatcgtctttttcgcgaagtcttacaaggcgcttacagacaatgccttaaggaaaatttcatatgaaagttaagaattaacaatcaacattttgattttaaatgaaaataacgattcttatctttttaagtattcgcttatttcctggcgatctcctacagagtctgtaagagatctctcacaaccagatggggtatttggattacagaagaggcttaagttgattaaggaattccgcaagatttgaggctaaatgcgtccgtttacgtgttcccagcgtctctttgcacacttcaccggagagattacacaccgagatgacctctaactcttcttccagcgtcgcgataaatagtgtgggcggcagttttagccttttctgagtcaccagatgaccaatcagattttcctgcacccgacggaagtcgtcttcactccaggtttgcagcaatgtcagtttgatatcgccaaactgcgcgtgcatatccccggcaaactgagtcgtataaaaggtatgaattgtgggttgtatcacaatatcaaaagcgcgttcaaccgcgtttacattttgttccccggtaaacggctggggttgccagtatacggcatcttcggtagttgaaataatgcacggtgaaggaacaccgtacagttcctcacttaacggccagcttttatgctcttcatgccacgcatcgcagtagcgtgcagtaaaatctttcagggcttgtgcggtcaaatcgtccactaatttctctcttcacttaaaccagatacacttgtcgtttagtttatctggtttatgacggtgaaacatgtcttcttatgcaaaccatcaggcacttgcgggcctgactcttggaaaatcaaccgattaccgggatacctatgacgccagcctactgcaaggcgttccacgcagcctgaatcgcgacccgctgggtctgaaagcggataacctgccttttcacggtacggatatctggacgctgtatgaactttcctggctgaatgcgaaaggtttgccgcaggtcgctgtcggtcatgttgaacttgattacaccagcgtaaatctgattgagtcgaagagttttaagctctatctcaacagttttaaccagacgcgttttaataactgggatgaggtgcgccagacgctggagcgcgacttaagcacttgcgctcagggtaagattagcgtggcgttatatcgtcttgatgaactggaaggccagccgataggtcattttaatggcacttgcattgatgaccaggatatcactatcgataactatgaattcactactgactatctggagaatgccacctgtggtgaaaaagtagtggaagagacgcttgtcagccacctgctgaaatcaaactgcctgatcacccatcaaccagattggggttcgatccaaattcagtatcgtggacgccaaattgacagagaaaaactgctgcgttacctggtctcattccgtcatcacaacgagttccacgaacagtgcgtggaacgcatctttaatgacctgttacgcttctgccagccagaaaaattgagcgtttacgcacgttatacccgtcgtggcggtctggacattaacccgtggcgcagtaatagcgattttgtcccatcgaccacaagactggttcggcaataaattttttctcaattttgcgtgctggattcacgcagaaggttgtgaaaggtcatcaggcagggctattgtaatcaaagggaatgacgatattcgtcccataaggagtttttcttgattacacatattagcccgcttggctccatggatatgttgtcgcagctggaagtggatatgcttaaacgcaccgccagcagcgacctctatcaactgtttcgcaactgttcacttgccgtactgaactccggtagtttgaccgataacagcaaagaattgctgtctcgttttgaaaatttcgatattaacgtcttgcgccgtgaacgcggcgtaaagctggaactgattaatcccccggaagaggcttttgtcgatgggcgaattattcgcgctttgcaggccaacttgttcgcggtcctgcgtgacattctcttcgtttacgggcaaatccataacaccgttcgttttcccaacctgaatctcgacaactccgtccacatcactaacctggtcttttccatcttgcgtaacgctcgcgcgctgcatgtgggtgaagcgccaaatatggtggtctgctggggcggtcactcaattaacgaaaacgagtatttgtatgcccgtcgcgtcggaaaccagctgggcctgcgtgagctgaatatctgcaccggctgtggtccgggagcgatggaagcgccgatgaaaggtgctgcggtcggacacgcgcagcagcgttacaaagacagtcgttttattggtatgacagagccgtcgattatcgccgctgaaccgcctaacccgctggtcaacgaattgatcatcatgccagatatcgaaaaacgtctggaagcgtttgtccgtatcgctcacggtatcattatcttccctggcggtgtgggtacggcagaagagttgctctatttgctgggaattttaatgaacccggccaacaaagatcaggttttaccattgatcctcaccggcccgaaagagagcgccgactacttccgcgtactggacgagtttgtcgtgcatacgctgggtgaaaacgcgcgccgccattaccgcatcatcattgatgacgccgctgaagtcgctcgtcagatgaaaaaatcgatgccgctggtgaaagaaaatcgccgtgatacaggcgatgcctacagctttaactggtcaatgcgcattgcgccagatttgcaaatgccgtttgagccgtctcacgagaatatggctaatctgaagctttacccggatcaacctgttgaagtgctggctgccgacctgcgccgcgcgttctccggtattgtggcgggtaacgtaaaagaagtcggtattcgcgccattgaagagtttggtccttacaaaatcaacggcgataaagagattatgcgtcgtatggacgacctgctacagggttttgttgcccagcatcgtatgaagctgccaggctcagcctacatcccttgctacgaaatctgcacgtaatctccgctcccccggtgacgtttgttgccgggttttctcgtttttggtcacttactcatcaactcatttcatttgttatatgaatgtttcttaccaccctcacgcgacaaatatcatcacagttaatatgtcatacaatttatgttgcaacgcaaacgtttccctattttcataaaccgtattttatcgctatgaaaaagaaattatcgccatgattaactaaaagtattgattttttcagttcaacctacatatattgcgcgccccggaagaagtcagatgtcgtttaatgggcaaatattgcccttaaattctcttttacttttgatttacagagtaaagcgttgggataatctatcttccaagtagattattgtatttgggatcaagatcactgatagatacataacttgtgtgtatctttccgccctcaaattattacggcggtaaatgattaagccatcgccgatagacagatttcatttttacggtcaggcaccttcccgggctgaactggctaaaagctgaattatttgcattcctccaggagaaatagatggaaacgactcaaaccagcacgattgcgtcgaaagactctcgtagtgcctggcgcaagacagacaccatgtggatgctgggcctttacggcacggcaatcggcgcgggcgtgctgttcctgccaatcaacgccggtgttggcggtatgatcccgctgatcatcatggctatccttgcgttcccgatgacgttttttgctcaccgcggcctgactcgcttcgtactgtctggtaaaaacccgggcgaagacatcaccgaggttgtagaagaacactttggtattggcgcaggtaaactgattaccttgctctatttcttcgctatctacccgatcctgctggtttatagcgtagcaatcaccaatacagttgaaagcttcatgtctcaccagctgggtatgacaccaccgccgcgtgcgattctgtcgctgatcctgatcgtgggtatgatgaccatcgttcgcttcggtgagcagatgatcgttaaagcgatgagtattctggtattcccgtttgttggcgtactgatgctgctggctctgtacctgatcccgcagtggaacggcgcagcactggaaacgctgtctctggacactgcatctgcaaccgggaacggtctgtggatgaccctgtggctggcaattccggtaatggtgttctcgttcaaccactctccgatcatctcttctttcgccgttgcgaagcgtgaagagtacggcgatatggcagaacagaaatgctcgaagatccttgcattcgcacacatcatgatggtgctgaccgtaatgttcttcgtcttcagctgcgtactgagcctgactccggcagacctggctgcggctaaagagcagaacatctcgattctgtcttacctggctaaccactttaacgcaccggttatcgcgtggatggctccgattatcgcgattatcgctatcaccaaatccttcctcggccactacctgggcgcacgtgaaggcttcaacggtatggtgattaaatctctgcgtggtaaaggtaagtctatcgaaatcaacaagctgaaccgtatcactgcgctgttcatgctggtaacgacctggattgttgccaccctgaacccgagcatcctgggtatgattgaaaccctgggcggcccaatcatcgcgatgatcctgttcctgatgccgatgtacgcaattcagaaagtaccggcaatgcgtaagtacagcggtcacatcagcaacgtattcgttgtcgtgatgggtctgattgcaatctccgcaatcttctactctctgttcagctaagtcctttcgcgccgctttcgggcggcgcttcctccgttttaacgcgatgtatttcctatgattagcgtattcgatattttcaaaatcggcattggcccttccagttctcataccgttggaccaatgaaagcgggtaaacaatttaccgacgatctgattgcccataatctgcttaaagacgtgacccgcgtggtggttgacgtgtacggctcgctctctctgaccggtaaaggccaccacactgatatcgccattattatgggcctggcgggtaacctgccggataccgtggatatcgattccatccctggttttattcaggatgtgaatactcatggtcgcctgatgctggcaaacggtcagcatgaagtggagttcccggttgatcagtgcatgaacttccatgcagacaacctttctctgcatgaaaacggtatgcgcattaccgcgctggcgggcgataaagtcgtttacagccagacttactactctattggcggtggctttatcgttgatgaagagcattttggccagcagaatagcgcaccggttgaagttccttatccgtacagttcagcagccgatctgcaaaaacattgtcaggaaaccgggctgtcactctctggcctgatgatgaaaaatgagctggcgctgcacagcaaagaagagctggaacagcacctggcgaacgtatgggaagtcatgcgtggcggtattgagcgcggtatttccaccgaaggcgtgttgcctggcaaactgcgcgttccacgccgtgctgcggcactacgccggatgctggtcagccaggataaaaccaccactgacccgatggcggttgttgactggatcaacatgtttgcactggcagtgaacgaagagaacgctgctggcggacgcgtggtgactgcgccgactaacggtgcgtgcgggattatcccggcagtgctggcgtactacgacaagtttatccgcgaagtgaacgctaactcactggctcgttacctgctggtagccagtgccattggttctctttataagatgaacgcgtcaatttctggtgctgaagtcggctgccagggtgaagttggtgtggcgtgctcaatggcggcggctggtctggcagagctgttaggtgcaagcccggcgcaggtgtgcatcgcggcggaaatcgccatggagcacaacctcggtctgacgtgtgacccggtcgccggacaggtacaggtgccatgcatcgagcgtaacgccattgcggcagtaaaagcggtgaacgccgcacgtatggcgctgcgccgtaccagcgagccgcgcgtctgcctcgataaagttatcgaaaccatgtacgaaacaggtaaagatatgaacgccaagtaccgcgaaacctctcgcggcggcctggcaatgaagatcgttgcctgcgattaatcgctctccagaggcctcgttttgcgaggcctcttcccgatttctcatccagccgtagcctgttccggcatcgaatgttacccttatcgcctgatctttaagggggttatcgtggctgttcatttgcttattgtcgatgcactgaatcttattcgtcgcattcatgccgttcaggggtcgccctgtgtcgaaacctgccagcatgcgctcgatcagctcattatgcacagccagccaacccacgcggtcgccgtttttgatgatgaaaaccgcagtagcggctggcgtcatcagcgtttaccagattacaaagcgggtcgaccgccaatgccggaagagttgcacgacgagatgcctgcattacgcgccgcctttgagcaacgcggcgtcccgtgctggtcaaccagcggcaacgaagccgatgacttagccgccacgctggcggtcaaagtgacacaggccgggcatcaggcaacgattgtttcgacagataaaggctactgtcagttactttcaccgacattacgtattcgtgattacttccagaaacgttggctggatgcgccatttatcgataaagaatttggcgttcaaccgcagcagttgcccgattactggggacttgcggggatcagcagttcaaaggtaccgggtgttgcgggaatcggaccaaaaagcgccacgcagctgctggtcgagtttcagagtctggaagggatatatgagaatctggatgcggttgccgaaaagtggcgcaaaaaattagaaacccataaagagatggcgtttctgtgccgcgatattgcccgcttacaaaccgatttgcatatcgacggcaatttacagcaattgcggttggtacggtaacggcgagccggatacgccgcaaacgtcgtatccggcattatcacatcagcgcatttaccaggcggtatggtaaagctctacaatatcctcaagcgttgcttcacgcgggttgccaccggtacaaacatcatccagtgccgcctgcgccagtgccggaatgtcttccttgcgtacaccaacatcacgcaaatgtggcggaataccgacatcacggttgagagcaaacaccgcttcaacagcggcattacgcgcctcttccaggctcataccttccactttcacgcccataacgcgcgcgatatcgcggtacttctcaccggtaaagtcagcgttataacgcatgacatgcggtaacaggatggcgttcgcaacaccgtgtggagtgttataaaacgcgcccagtggatgcgccataccatgcaccaaccctaacccaacattcgagaagcccatacccgcaacatactgcccgagcgccatttcttctccggcatccttatcaccagcaaccgatcctcgcagcgccccagcaatgatttcaatcgctttaatgtgcagtgcatcggttagcgcccacgcgccacgggtaatatacccctcaatagcatgagtgagcgcatcgacacccgtcgcagctttcagcgctggaggcataccatccatcatgtcagcgtcaataaacgccacctgcgggatatcatgcggatcaacgcaaacaaacttgcgccgtttctcttcgtcagtgatcacgtagttaatggtcacttctgccgcagtacctgctgtggtaggaattgccagaatcggtacactgggtttattggtcggggaaagcccttccaggctacgcacatcggcaaactccgggttgttgctgataatgccaatcgctttacaagtatcctgtggagaaccaccaccaatagcgatcaggtaatccgcgccgctattctggaatacaccgagcccttctttgacgacagtaattgttgggttgggcactacgccgtcgtaaatcgcccatgccagccctgcagcatccatcttatcggtcactttcgccaccacgccgcattgcaccagcgttttatcggtgacgatcagcgccttctgataaccacggcgtttcacctcatcggttaaagccccaacagcaccccgaccaaaccatgccgtttcgttcagaatcattctgttagccatcatccttctccttgttgctttacgaaattactcttcaattcgtaacccataggttttgaatttctccagcactacggcaatctcttcatcgctcagcactggcaccgggtccgtaatcgccagggtcgtcaggtaaagttgcgccagcacttcaacttcatgcgccagccataacgctttttccagattcacctcacaagcgataagcccatgatgttgtaacaaagttgccttacgatttttgagagccagcgcaacatgttcagaaagttcgcgtgttccaaaggtcgcataaggcgcgcaaggaatagaattaccgccagccgccgcaatcatgtagtgaatagcggggatcgatcggttaagaatggaaactgccgtgcaatgaacggcatgattgtgaacaaccgcgttggcatccggtctgctttgataggctgccatatggaaacgccattcgcttgaggggagctttccttcctcatgtttaccgttgccatcaataaagacaatatgcgactccgtcagtttttcatatggaatgcctgtaggcgtaatcagcatcccatcctgataacgtacactgacgttccccgctgtcccctggttcagtcccaggcgggtcatttccaggcaagtgtcaataatctgacgagcaagtttatttcgttccattagctacctctctctgattcaaaacagggcaataatgttgttcctttcacactattgaattagccgtttaattacccaccatcttcttcctgattaacaagaaagaaattcacaagcttatattttgtgacctggttcaactaatcacagtaaataactgcaagttctctttttataaccccattaaaaatgaccgctcttaaaaatatttatcaaaacggtcatttttctattcctccaagcccggaatgaccgttttcggcacaaacaattaatacggtcatctgatttgtgttttttatgatttattttctgaaacgggcatgaaatttcgattattaaagtgatggtagtcacataaagtcaccttccagctaataagtgtgaccgccgtcatattacagagcgttttttatttgaaaatgaatccatgagttcatttcagacaggcaaatattcactgatatgaagcccgaactcgctggttttgcacttttgaaaacataaccgattacgtgcttaagcttctgaacctaagaggatgctatgggaaacacatcaatacaaacgcagagttaccgtgcggtagataaagatgcagggcaaagcagaagttacattattccattcgcgctgctgtgctcactgttttttctttgggcggtagccaataaccttaacgacattttattacctcaattccagcaggcttttacgctgacaaatttccaggctggcctgatccaatcggccttttactttggttatttcattatcccaatccctgctgggatattgatgaaaaaactcagttataaagcagggattattaccgggttatttttatatgccttgggtgctgcattattctggcccgccgcagaaataatgaactacaccttatttttagttggcctatttattattgcagccggattaggttgtctggaaactgccgcaaacccttttgttacggtattagggccggaaagtagtggtcacttccgcttaaatcttgcgcaaacatttaactcgtttggcgcaattatcgcggttgtctttgggcaaagtcttattttgtctaacgtgccacatcaatcgcaagacgttctcgataaaatgtctccagagcaattgagtgcgtataaacacagcctggtattatcggtacagacaccttatatgatcatcgtggctatcgtgttactggtcgccctgctgatcatgctgacgaaattcccggcattgcagagtgataatcacagtgacgccaaacaaggatcgttctccgcatcgctttctcgcctggcgcgtattcgccactggcgctgggcggtattagcgcaattctgctatgtcggcgcacaaacggcctgctggagctatttgattcgctacgctgtagaagaaattccaggtatgactgcaggctttgccgctaactatttaaccggaaccatggtgtgcttctttattggtcgtttcaccggtacctggctcatcagtcgcttcgcaccacacaaagtcctggccgcctacgcattaatcgctatggcactgtgcctgatctcagccttcgctggcggtcatgtgggcttaatagccctgactttatgcagcgcctttatgtcgattcagtacccaacaatcttctcgctgggcattaagaatctcggccaggacaccaaatatggttcgtccttcatcgttatgaccattattggcggcggtattgtcactccggtcatgggttttgtcagtgacgcggcgggcaacatccccactgctgaactgatccccgcactctgcttcgcggtcatctttatctttgcccgtttccgttctcaaacggcaactaactgaacatattttccgaataaagtgaggaatctgtaatgaaaaaaatcagcttaccgaaaattggtatccgcccggttattgacggtcgtcgcatgggtgttcgtgagtcgcttgaagaacaaacaatgaatatggcgaaagctacggccgcactgctgaccgagaaactgcgccatgcctgcggagctgccgtcgagtgtgtcatttccgatacctgtatcgcgggtatggctgaagccgctgcttgcgaagaaaaattcagcagtcagaatgtaggcctcaccattacggtaacgccttgctggtgctatggcagtgaaaccatcgacatggatccaacccgcccgaaggccatttggggctttaacggcactgaacgccccggcgctgtttacctggcagcggctctggcagctcacagccagaaaggcatcccagcattctccatttacggtcatgacgttcaggatgccgatgacacatcgattcctgccgatgttgaagaaaaactgctgcgctttgcccgcgccggtttggccgtcgccagcatgaaaggtaaaagctatctgtcgctgggcggcgtttcgatgggtatcgccggttccattgttgatcacaacttctttgaatcctggctgggaatgaaagtccaggcggtggatatgaccgaactgcgtcgccgtatcgatcagaagatttacgacgaagccgaattggaaatggcactggcctgggctgataaaaacttccgctatggcgaagatgaaaataacaaacagtatcaacgtaatgccgagcaaagccgcgcagttctgcgcgaaagtttactgatggcgatgtgtatccgcgacatgatgcaaggcaacagcaaactggccgatattggtcgcgtggaagaatcacttggctacaacgccatcgctgcgggcttccaggggcaacgtcactggaccgatcaatatcccaatggtgacaccgccgaagcgatcctcaacagttcatttgactggaatggcgtgcgcgaaccctttgtcgtggcgaccgaaaacgacagtcttaacggcgtggcaatgctaatgggtcaccagctcaccggcaccgctcaggtatttgccgatgtgcgtacctactggtcaccagaagcaattgagcgtgtaacggggcataaactcgatggactggcagaacacggcatcatccatttgatcaactcaggttctgctgcgctggacggttcctgtaaacaacgcgacagcgaaggtaacccgacgatgaagccacactgggaaatctctcagcaagaggctgacgcttgcctcgccgctaccgaatggtgcccggcgatccacgaatacttccgtggcggcggttactcttcccgcttccttaccgaaggcggcgtcccgttcaccatgactcgtgtcaacatcatcaaaggcctgggaccggtactgcaaatcgcggaaggctggagcgtggaattgccgaaggatgtgcatgacatcctcaacaaacgcaccaactcaacctggccaaccacctggtttgcaccgcgcctcaccggtaaagggccgtttacggatgtgtactcggtaatggcgaactggggcgctaaccatggggttctgaccatcggccacgttggcgcagactttatcactctcgcctccatgctgcgtatcccggtatgtatgcacaacgttgaagagaccaaagtgtatcgtccttctgcctgggctgcgcacggcatggatattgaaggccaggattaccgcgcttgccagaactacggtccgttgtacaagcgttaatacattactccctgatgtgatgcccggtcgctccggctaccgggcctgaacaagcaagagtggttagccggataagcaatgttatccggctatattgcaggagcgattatgaaacaagaagttatcctggtactcgactgtggcgcgaccaatgtcagggccatcgcggttaatcggcagggcaaaattgttgcccgcgcctcaacgcctaatgccagcgatatcgcgatggaaaacaacacctggcaccagtggtctttagacgccattttgcaacgctttgctgattgctgtcggcaaatcaatagtgaactgactgaatgccacatccgcggtatcgccgtcaccacctttggtgtggatggcgctctggtagataagcaaggcaatctgctctatccgatcattagctggaaatgtccgcgaacagcagcggttatggacaatattgaacagttgatctccgcacagcggttgcaggctatttctggcgtcggagcctttagtttcaatacgttatataagttggtgtggttgaaagaaaatcatccacaactgctggaacgcgcgcacgcctggctcttcatttcgtcgctgattaaccaccgtttaaccggcgaattcactactgatatcacgatggccggaaccagccagatgctggatatccagcaacgcgatttcagtccgcaaattttacaagccaccggtattccacgccgactcttccctcgtctggtggaagcgggtgaacagattggtacgctacagaacagcgccgcagcaatgctcggcttacccgttggcataccggtgatttccgcaggtcacgatacccagttcgccctttttggcgcaggtgccgaacaaaatgaacccgtgctctcctccggtacatgggaaattttaatggttcgcagcgcccaggttgatacttcgctgttaagtcagtacgccggttccacctgcgaactggatagccaggcagggttgtataacccaggtatgcaatggctggcatccggcgtgctggaatgggtgagaaaactgttctggacggctgaaacaccctggcaaatgttgattgaagaggctcgtctgatcgcgcctagcgcggatggcgtgaaaatgcagtgtgatttattgtcgtgtcagaacgctggctggcaaggagtgacgcttaatactacgcgggggcatttctatcgcgcggcgctggaagggttaactgcgcaattacagcgcaatctacagatgctggaaaaaatcgggcactttaaagcctctgaattattgttagtcggcggaggaagtcgcaacgcattgtggaatcagattaaagccaatatgcttgatattccggtaaaagttctcgacgatgccgaaacgaccgtcgcaggagctgcgctgttcggttggtatggcgtaggggaatttaacagcccggaagaagcccgtgcacagattcattatcagtaccgttatttctacccgcaaactgaacctgaatttatagaggaagtgtgaaatgctgaaaacaatttcgccgttaatttctcccgaactattgaaagtgctggcagagatgggacatggagatgaaattattttttccgatgctcactttcccgcccattcgatgggaccgcaggtgatccgcgctgatggcctgttggtgagcgacttgctccaggcgattatcccgttatttgaactggacagttacgcaccgccgctggtgatgatggcagcggtagaaggtgacactctcgatcctgaagtagaacgacgttaccgtaatgcgctttcactacaagccccgtgtcctgacatcatccgcatcaatcgttttgcgttttatgaacgggcgcaaaaagcctttgcgatcgttatcacaggcgaacgagcgaagtacgggaatattcttttaaaaaaaggggtaacaccgtaatctcataccggtacgcccgcatgacgcgggcggttatcgaatgatggggtgaaaaatatgaaagcggcacgccagcaagcgatagtcgacctgctgctgaaccataccagcctgaccacggaagctctctctgaacagctaaaggtcagtaaagaaaccattcgtcgcgatctcaatgaattacagacgcagggtaaaattctgcgcaatcatggacgcgctaaatatatccaccgtcaaaatcaagacagtggcgatccctttcacatcaggctgaaaagccattatgcgcataaagcagatatcgcgcgcgaggcgctcgcgtggattgaagaagggatggtgatagccttagacgccagttcaacttgctggtatctggcacgccagttgcctgacatcaacattcaggtcttcaccaatagccatccgatttgccatgaactcggtaaacgcgaacgcattcaactgatcagttccggcggcacacttgagcgcaaatatggctgttacgtcaatccctcgctgatttcccaacttaaatcgctggaaatcgatctgtttattttttcttgtgaagggatcgatagcagcggcgcactgtgggactccaatgccatcaacgctgattacaaatcgatgctattaaaacgtgccgcgcaatcgttgttattgattgataaaagtaaatttaatcgttcaggggaagcccgcatcgggcatctggatgaggtaacgcacattatttctgatgagcgccaggttgcaacttctttggtaatagcctgacggaaagggtagcaggccggagacgacgccccggccttgcctgttatcgctcgtcgcgacgaccacccaccgcagcccagatgcggcggacgtgcaccgtcacttcttcgcgatcgtgatacaactgccgcgcctgaatctgagcatttatgccatgttcatcaagctgtgcctgaatatacgccagattgtgtgacacttcttcgtagcgttttttcatcggcagtttgaggttgaaaatggtttcacgacaccagccattaaccagccactgcgccatcaatgccgcaactttcgccggtttttcaaccatatcgcataccatccaggagatattgctgcgcgtcggacggaatttgaaaccgtcttcccgcagccacgtcacctgtccggtatccatcagactttgcgccatcgggccgttgtcgacggaataaacccacatgttgcgcttcaccagttggtaggtccagccgccagggcaagcgcctaaatccaccgcccacatcccgttcgccaggcgttcatcccactcatccgcaggaataaacacatgaaatgcctcttccagtttgagtgtggaacgactcggcgcatctgccggaaatttcaggcgcggaatgcccatatagaacggcgaattattgttgctgtatgagtaaccggtatagcagcagcctggtgcaataaagaatacatgcacaaccggacgcttcggcgtttcatagttcgccagcaccccagcatcgcgcaaggcagcgcgtagcggcacggtgaatttacggcagaatttcagcaactctttgctttcgttggtatcggcaacttcaacacgcagttcaccgcccttctctactacaccctgtaacatgccgacaatgggggtaatacgatcttctggcggcaaatgctgcaggagttcccccaccacaaaccactggcgggcaaaaattaatgaactgaacggcagctcacggattaacttatcgccatcatcaggttgataacattcataaatgacataacccgcattctctttcacgcgggcaaaaccgaaaatttcccgctggccggctttatcggtaatttctgcggcgcactctttttcaaaccccggacggcacagcaatacaaccttattcatgacttacgcccttgcgctttaaacggatagcaccaactaacattaacgcccagcccgcaaggaagctcacgccgccaaccggagtgacaaacgcccacaaacgcagatgggacagtgccaggcaataaaggctgccgctgaacagcaccgtgcctaacgcgaggaaaacgctactccagtaaaaccagatactgatgcgacgctgcattgccaccgccagacctaagatcgccagcgtatgaaacgcctggtattcgagaccggtctggatccagcccatctcaacggcccccatggttttacttaacacatgcgcgccaaaagcgcccagagccacaaaaatgaagccgctaatggcggcgaaaatcagcataaaacggctggtcatggtcgtaccctacgtaaattattgttcataacgaaagcggaatttttcttgttcagcagcggctttcgccaggatccattgacgaaaggcggctattttacccagttctgcctggctgtcatgacaaaccagataaaaagcgtttttactgaccagaacatcattaaacgggcaaacaagacgtccggcctcgatttcagattgcgccatcacgttatttgccagcgccactccctgcccgtggatagccgcttgcagcaccatggcgctatggctaaaaattggcccttgctgaacgttgatatgatttaaccccaactgtcgggtatatgtctgccagtcacggcgcgacgcatcatgtaataacgtatgtttagccagatcttccggggtcttcaagggtttttcgccagtcagcagtagcggcgaacacaccggcaataaatattcggcgtacagtttttccacccgtagccccggccagttgccccgaccataaaatatcgccacatcaacatcatccgccagcttatcttcctgacgatcaaccgcctggattcgaacgtcaattcccggataagctgaattaaagctggaaagtcgcggaaccaaccaatgaatggcgaaactggggagtaaactgaccgtcaacgcccccttggcgctacgggcctggagtttacgcgtcgcttcggttaattgcgaaaatatctctttgatatcgaggaaatagctttgcccttcctcggtcagcaggagtgaacgattacggcggcggaacagttttagccccaaaaaatcctcaagagacttgatttgatgacttactgcggcctgggtcacaaaaagctcttctgctgcgcgagtgaaacttaaatggcgtgctgcagcatcaaaaactcgtaaggcatttagcggtggtaatcgtttagacatggcttttaaactttgatgttaaatgaatttaacaattagatcacactgtgtaacctattagtttttttaatctgagccattataaattgtccgttgagcttctaccagcaaatacctatagtggcggcacttcctgagccggaacgaaaagttttatcggaatgcgtgttctggtgaacttttggcttacggttgtgatgttgtgttgttgtgtttgcaattggtctgcgattcagaccatggtagcaaagctaccttttttcacttcctgtacatttaccctgtctgtccatagtgattaatgtagcaccgcctaattgcggtgcttttttttaccttgcgatcgcgaattactgatccagttcgaccatctctttcacgtcagtacggttgatctgctgtttgttgccattagcgtctttatacgaaatcataccggtatcgttatcagtctgtggtttgccgtcagagacgatggtacgtccgtcattggtgtgcatcacatagttcgaaccggaacaggcgctcagggcaaaagtcagcatacaggcagaaataattgcggcagtctttttcatcatcttctccttaaagcgattaataaatcttaatagtattgattaacaggctaaaattaacgcctaacactattcagcatatgttactgacgcggcttcgccaggatatccagataattctgatggttagcactctccttgtatcaaagtgaattttgcgtcacgatcggtgcatcaagccgaggagtaccatgaacgtttttaatcccgcgcagtttcgcgcccagtttcccgcactacaggatgcgggcgtctatctcgacagcgccgcgaccgcgcttaaacctgaagccgtggttgaagccacccaacagttttacagtctgagcgccggaaacgtccatcgcagccagtttgccgaagcccaacgcctgaccgcgcgttatgaagctgcacgagagaaagtggcgcaattactgaatgcaccggatgataaaactatcgtctggacgcgcggcaccactgaatccatcaacatggtggcacaatgctatgcgcgtccgcgtctgcaaccgggcgatgagattattgtcagcgtggcagaacaccacgccaacctcgtcccctggctgatggtcgcccaacaaactggagccaaagtggtgaaattgccgcttaatgcgcagcgactgccggatgtcgatttgttgccagaactgattactccccgtagtcggattctggcgttgggtcagatgtcgaacgttactggcggttgcccggatctggcgcgagcgattacctttgctcattcagccgggatggtggtgatggttgatggtgctcagggggcagtgcatttccccgcggatgttcagcaactggatattgatttctatgctttttcaggtcacaaactgtatggcccgacaggtatcggcgtgctgtatggtaaatcagaactgctggaggcgatgtcgccctggctgggcggcggcaaaatggttcacgaagtgagttttgacggcttcacgactcaatctgcgccgtggaaactggaagctggaacgccaaatgtcgctggtgtcataggattaagcgcggcgctggaatggctggcagattacgatatcaaccaggccgaaagctggagccgtagcttagcaacgctggcggaagatgcgctggcgaaacgtcccggctttcgttcattccgctgccaggattccagcctgctggcctttgattttgctggcgttcatcatagcgatatggtgacgctgctggcggagtacggtattgccctgcgggccgggcagcattgcgctcagccgctactggcagaattaggcgtaaccggcacactgcgcgcctcttttgcgccatataatacaaagagtgatgtggatgcgctggtgaatgccgttgaccgcgcgctggaattattggtggattaatgacaaacccgcaattcgccggacatccgttcggcacaaccgtaaccgcagaaacgttacgcaataccttcgcaccgttgacgcaatgggaagataaatatcgccagttgatcatgctggggaaacagcttccggcattgccagacgagttaaaagcgcaggctaaagagattgccggatgcgaaaaccgcgtctggctgggatatacagtggctgaaaacggcaaaatgcatttctttggcgacagcgaagggcgcattgtgcgcggcctgctggcggtgttgttgactgccgttgaggggaaaaccgccgccgagttgcaggcacagtcaccactggcattgtttgatgagctgggattacgtgcgcagcttagcgcctcacgcagccaggggttaaatgcgttaagcgaggcgattatcgctgcgacgaagcaggtttaagcacagaaccgggtcggataagacgttcgcgtctcatccgacctgattgtttaaccctgacgcgccgctttcgccatcatcttcttcagcgcatgagaaaccgtaacaaacccaaaggtggcggtcaccatcgttgccgcgccaaatccagatgcacaatccatccgcttcggcccttctgccgtggctttcatcgcacacaccgtaccgtctgactgcgggtacaccagcgcttcagtagaaaacacgcaatccacgccgagcttacctttactgtttttcactacgccaaaatcgcttttcaggcgctcgcgcaacttcgccgccagcgggtcctgaatcgttttcgccagatcggtaacctgaatctgcgtcggatcaatctgcccacccgcgccaccggttgtgaccagtgggattttattgcgccgacaataagcaatcagcgccgctttgggccgtacactatcaatggcatcaatcacgtacgaataacccacgctcatatactgcgctacgttatccggcgtcacgaaatcatccaccaccgttacacggcactccgggttaatctggcgaatacgctccgccataacttccgcttttgccagcccaacgttatcgcgcagggcatgaatttgccgattggtattggtgacgcacacatcatccatatcgataagcgtgattgcgccaatccccgtgcgcgccagcgcttccgccgcccaggaaccgacaccaccgataccaaccacacaaatatgcgcgtcagcaaacagttgcaacgctttttcaccatacagacgcgctgtgccaccaaaacgctgacgccatgcatcactaattaccacagacatagcacctcagaattaaaaagggcgaggttatccctcaccctaaacgcataaatgcctgatgcgctacgcttatcaggcctacataactcctgcaatattttggatttgcatgatttgtaggccggataaggcgttcacgccgcatccggcatgaacaacgcgcacttagtcaataatcaggatgtgaggttacccctcaccctgtcatatccgtaaaaacggcatacagaatatcacatcagccgctaaagacgttacctgcgcccggggcggttttcagcacccagacacgtccatagtggttgtaccaacctgcgcggtgtccggcttccggcccgatcccttgatagatatcgaagtgttggcctttgattgcaccaccgacatccagcgccaccatcagacgcagttcgtactgaccattaaatttgccgttattatccagcaacggcacttctgccagcaaggtagtacctggcggaataatggaacgatcagaggcaactgacgcgcgaccaaccagcggcaccgcacttgcccctttcaccggagcaaaagattgcggtttaaagaagacgaaagacgggttctgttccagcagctcgcgaacctcggcttcactgtgtgtttcgccccagtgacgaatcgcctgcatcgacatatcttcttttttcacttcgccacggtcgatcagcaccttaccaatgctgcgataggcatgaccgtttttccctgcatagctgaaaaagttaagcggactgccatcaccaaagtcgatatacccactaccctgcacatccataatgaagttatccatcagggagttactgtaagcgagaatatatttatcactcaatgcccccgcgtagatctccgcacgagacggcagacgaccacgttttggcggcatacggtaaataggatactggaactcgccctggcgggtatggcgcgcctgaattaccggcgtgtaataaccggtaaactgcacgttaccatagttgtcggcaccttccatctgccaggcatcaatgccgaactggcgcatattgcgggtatcaccgcctgcgcgcagccactcttgcaccgcgttataaacattactctggttgccatacagacgcggtgacgaattacggatatggttaatttgctcggcaaaatcaccggcgttaatcggcgcgccaacggcatctggctggttcaccagagagaaaggctgggtaaatttcccgtctttatattgctgtccgcgatcggttggtttggaagagcaggcggcaagcattgccacaaccgtgcccataagaaggtactttacccaacgtcctttcattgttctcttcttcaggttaaaaaataaggcgcaacgaagataacaaaccgccgcgtttaatgaaatgagcagcctctccctgacgcaaattttgcacaaaaaataggctttagtgatttgtttttgttcaaaatcatgccaaatccgtgatcggggtaaaaaaaaggttgcatgaaaacgcgagcggagtatagtgcgcatccacggacgcggggtggagcagcctggtagctcgtcgggctcataacccgaaggtcgtcggttcaaatccggcccccgcaaccaattaaaatttgatgaagtaaagcagtacggtgacgcggggtggagcagcctggtagctcgtcgggctcataacccgaaggtcgtcggttcaaatccggcccccgcaaccaattattgaacaccctaacgggtgtttttttgtttctggtctcccataaaaaagcgccattcagcgcctttttatcatccccttctcgccagcgtcgccccatcggcaaaatacgctttaatccccgcaagaatagactccgcaacttcctgctggaaagtcgccgttttcagtttacgctcttcctcaacgttactgataaacgccgtttcgaccagaatggagggaatatctggtgcctttagtacggcaaacccggcctgttcaacttgatttttatgcagcttgttgattttaccgagcttattcagtaccgctttaccaaacttcaggctgtcggcaatggtcagcgactgtaccatatcgaacatggtgtggtcgacatagcggtcaccgcttttgctcacgccaccaatcaagtccgaggcgttctgggtttgtgccagatattttgccgcagtactggttgcacctttggttgagagcgcaaacacagaggaaccgctcggctgacgactggtaaaggcgtcggcatggatagagacaaacaggtcagcacgctgtttctgggcttttgctacgcgcacttgcaatggaatgaagatgtcttcattgcgcgtcatgtacaccttcatattgccctctttctcgatcagagagcgcaaacggcgagctatttgcaataccacatctttttcgcgcgttttgtatttccccaccgcaccggagtcttcgccaccgtggccagggtcaagcataatgacaatcggacgatcgcgccctgctttacccggttgtggaccactttgcgctggcggcacctgcttttcgaggtcgcctttgttgtaatcctccagcagcgccagcagcgggtcctgcatatcctgtgcattggccggatagaggtccatcaccagacgctctttaaacccggcgaccggcgcaagggcaaacagctgcggttttacgttttgctttaattcaaaaaccatccgtacggtttgcgggtcaaattgcccgacgcgcgccgacttgatgaacgggtcgtctgcacgaatttgtgccgccatccccttgagtaccgagttcaggtttacatcttcgatatccaccaccacgcgttccgggttactcaacgcgaactgcttatatttcagctgacgatttgattctaccgtcacgcgggtgtagctggacgcaggccagacgcgcaccgccacgacctggctgaccgcagccagactgacctgacttacgctcaatagccacatggcacccgcgccttgcagtaaacgacgacggctgattgcagtgttggatcctgacatgcctctcccgagcaaaagaaatctaagctgtgtaacaagtaaacgactaatttgaccggaaactttagcgaaagacgcataatctgtcatctaataaacggtaaacattctttttatattcacggcattactgataaaaaagtcgctctcgcataaaatttacacttgcaccctgcgaaaaacagaataaaaatacaataatttcgaataatcatgcaaagaggtgtgccgtggtaaaggaacgtaaaaccgagctggtcgagggattccgccattcggttccctatatcaatacccaccggggaaaaacgtttgtcatcatgctcggcggtgaagccattgagcatgagaatttctccagtatcgttaatgatatcgggttgttgcacagcctcggcatccgtctggtggtggtctatggcgcacgtccgcagatcgacgcaaatctggctgcgcatcaccacgaaccgctgtatcacaagaatatacgtgtgaccgacgccaaaacactggaactggtgaagcaggctgcgggaacattgcaactggatattactgctcgcctgtcgatgagtctcaataacacgccgctgcagggcgcgcatatcaacgtcgtcagtggcaattttattattgcccagccgctgggcgtcgatgacggcgtggattactgccatagcgggcgtatccggcggattgatgaagacgcgatccatcgtcaactggacagcggtgcaatagtgctaatggggccggtcgctgtttcagtcactggcgagagctttaacctgacctcggaagagattgccactcaactggccatcaaactgaaagctgaaaagatgattggtttttgctcttcccagggcgtcactaatgacgacggtgatattgtctcagaacttttccctaacgaagcgcaagcgcgggtagaagcccaggaagagaaaggcgattacaactccggtacggtgcgctttttgcgtggcgcagtgaaagcctgccgcagcggcgtgcgtcgctgtcatttaatcagttatcaggaagatggcgcgctgttgcaagagttgttctcacgcgacggtatcggtacgcagattgtgatggaaagcgccgagcagattcgtcgcgcaacaatcaacgatatcggcggtattctggagttgattcgcccgctggagcagcaaggtattctggtgcgccgttctcgcgagcagctggagatggaaatcgacaaattcaccattattcagcgcgataacacgactattgcctgcgccgcgctctatccgttcccggaagagaagattggggaaatggcctgtgtggcagttcacccggattaccgcagttcatcacggggcgaggttctgcttgaacgcattgccgctcaggcgaagcagagcggcttaagcaaattgtttgtgctgaccacgcgcagtattcactggttccaggaacgtggatttaccccggtggatattgatttactgcccgagagcaaaaagcagttgtacaactaccagcgtaaatccaaagtgttgatggcggatttagggtaagcgacgaaaatcgccggatgcgacatgcgtaacactcgtgcgtcgcatccggcaattacgtttattcccgcgaactaaacaacgccgccagaccactgcgccgctcagtacgagtggcgattgccgcacttaatatacgctcatcggcatacagcgacagacggcgacgcgcgcgggtcaccgcggtgtataccagctctcgcgttactaccggcgtgcgttggctcggtaaaatcaacgccgcatggtcgaactccgatccctgcgatttatgtaccgtcatcgcccacgtagtttcgtgctctggcaagcgactcggttgcacagacttaatattgccgtccggcatcgcaaaccagacgcgcgtcccctgcccgcgatccagcgcaataccgatatcgccattaaacaacccaagcgcgctgtcattacgggcaatcatcaccggtcggccttcgtaccaacgagagtgcggatgacgatgaattttgcgcttctgttgcataaactgctcaattcgctcattcagtccagccacgccaaacggcccttcccgcagggcgcacaaaagctggtactcattgaacgcctgaatgattaaatccggctcggcacgcgcttgcagcagatccagataacgtccgtaacccgcaagagcttcctcaagcatcgcaatataatcttcgccgctctgtaaaagtcgtttttcgatatcagtaaaatcctgctgaaaaacggttttcactgccgttttatcaccacgattgatcgccgcagctaactgaccaatgccagaatcgctgccgaaacgatagcttttttgcagcaggcagagactgtcgcgcaaagatgccgcttctgtgccggttcctgccggaacgtgagtccccgtcaggcggcttagctgcctggcacgctcggcggtaaagcccgcgttggcataagcgcagatatcgcccagcacagccccagcctcaaccgaggccagttgatcacgatcgccgagaaagatcactcgcgcatgatctggcaaggcgtcgatcagtctcgacatcataggcagatcgatcattgacgcttcatctaccaccagcacatcaagatgcagcgggttaccggcatgatgacgtaaacgctggctacccggctgcgcacccagcaatcggtgcaaagtgctggcatcttccggaatgcgtttcttttgttcatcgctcagcggtaactgtcgcaaagccttgccgagagattcggttaagcgcgcggcagctttacccgttggtgcagccagacggatacggcagcgttcgccgtcggccatttgaattaacgctgccagcaacttcgccacggtggtcgttttaccggtgcctgggccgccggaaatcaccgagatccgccgcgtcagcgccactgccgccgcaactttttgccagttaatttcatcgcttactggaaaaagtttgtccagggtttgcgccagtagagcttcatcaacctcgatggcatgattcacctcattgaagaagcgcgctaccgtccgctcgttacaccacatgcgattcaaataaagacgatcgccacagaggatcatcggcgtgggttcatctccccggctgaccgcttgtgaagccagcaagcattcttcccaattttgtagctcaccgatttcactgacacaggtcgccaacagcggatgcgacgcctcgttattttccagtcgtgaaagcggtaaacagacatgcccttccccggcgtcgtggcttaacagggctgccgcgagggtgacggcaggatgttcatctcccgccacggtcagggcaaattgcacatccagcgggcgtagctgtttgtgctccacagcttccagtaattgcttttgcaatttcattacgcctcctccagggtcataccggaaaacatctcatccatcaggtcaatcaaccctgcattgggtcgggttgtgtaaatcccctgttgcggatgttctttatcaacgccacgcaggaacagatagataacgccgccaaagtgacgatcatagtcgtaatcagcaatgcgatggcgcagataacgatgcagcgccagggtataaagctgatattgcagatcatagcggtgtgcctgcatcgctgctgccatagcctgttgggtgtaagccgaactgtcttcacccaaccagttggatttatagtcgagcaggtaataacgcccttcgtggcggaacaccaggtcgataaagccttttaacatgccacgtacctgcatgaactccagcggcgggcagcctgcggatagcgggtcaaactggcggattaacgtatcaagctgactggcgataagcggttcactaatcggcagataaaactccatctccacctgtttattgcgggcggaaagttgactcaggcttacgccggtttcattgagaggtgcctggaggacagccgtgatccactcggtcaataccggttcccactgcgattcaaagccgccgagttccagtttttcccgcacccagttcgggtcaaccggctgggtaaaatccaggtcttcaaacaaactgtgcaagaatgtccctggtgacgcaccgcgcgggaactgatgcggtgttaacgtcggttcttcaacgacgctgaccacgcctgcggcatcaacatccagccgtggcatcagatcctgagcgataccgtgaccacgctgctgcaaaccggagtagctggtgacacgccagttatcgccgggcaatcgttgtagcgtcctcgcattcagttctgcagttaaagcatcattaacctgccagggctgtttatcacccgtttgtgccgtttgccaggcaatatcatcatcgcataacgcttcaatacaggtgcgaagccctgccgcatcttgcggttcccctttttgcagcaaacgcccgagcgcactttggtggacgtcggtgtcaccttttttatcgccacgacggcgcaccagcggtgcaacgccgagactgcaatgccaaaccgaacgtgtcagcgccacgtaaagcaaacgcagatcttccgccagacgttcggcctccgcgaggtcgacgctttctggcgcagcattaagatccagaactgcctcaaacgagtggcgatcgtgataaaacgcctgctcctggacgcggaaattggtgataaacggcagccagaccaatggatattccagccctttcgatttgtggatcgtgacaatctgcaccagatgtttatcactttcgagacgcatttgttggctggaggcattactgtctggctcgaggatatgttgcgataaccagcgtaccagcgcatgttcactttccagctgcgttccggcttcttgtagcagttcgctgatatgcaagatatcggtaagacgccgctcaccgcctgccgttgccagcaagttttctgcaatgttacgcgccgacatcagcgcccgcagcatcggcataacgccacgtttgcgccagatttgccgataaccatcgaactcttcaactaccgcatcccacgcatgttcgtcattattcagcgtttcgatatccagcgcgttcagccccatcattgacgttgccagcgcactacgcagggtgttctcacgttcgggcgtcatcaccgcctgcaacaaccaaagcatttcctgcgcttccagagtttcaaaaacactgtcgcggttcgaaaggtaaacggaagggatttccagcaacgttaaggcatcgcgcacctgggcggcctcctggcggctgcgcaccagcacactgatgtccgaagcacgcaccggacgcgcgtcgtcgccgttcatcagcaacgcttcgcccctctgtccggcttgtagccagtcgcggatttgcgcagcacatacctgcgccatggtactttgataatcgccaacgccgcagctttcgccttccatcagccacattttcatcgcaggctgcgtttcacctttaaatacaaaacgtaacgcctgatttttcccggctgatttcactggaataaacggtatttcgcgaaacatgaacgcgtcatcagtctggctgaaaagcttattcacgctgttcaccattcctggtgcggaacgccagttggtgtctaaagtgtagtgggcgtgaacttcgctacgcgccttcatataagtgaagatatccgcaccccggaatgcatatatggcctgcttcgggtcgccaattagcaacaatgcggtttccggctgatggtgccagatacggcgaaaaattcggtactgctgggggtcggtatcctgaaattcatcgatcattgccaccgggaatcgcgtacggatcgccgctgccaacacctcaccgctttcgctacgcagcgcggaatcgagccgacttaacatgtcatcaaaacccaattcgccacggcggcgtttttcacgcgctactgtttcgcggatctcagccaatgcgcgggtgatcaccagatcgcggatcgacaatggttctgcaagcagttgatcgatcgcctcaaacagtggatgtcgcggggtttcccccccggccttcgtgcgatcttctaagaaacgctgggagaatttttccagcgactccggcaactgataactgtttgtctcttcttctgcccaggcgctgatcttgtcgatccatttagcctgattgctacggttaaacttgcgtcgctcaataccagaagattcgatcagcgcatccagttcacccactgcgtcgcgccactgctgttttaccgtatcaatacgcgccacaatttgcgcgtgacgggaagccagcgtttcatcatcgggcggcggtgctttgataaccggcgcttcgccttgcagataacgattaatatcgcgcagcaacgcctgcggccctttccaggtttcaaagacgacctgggctatttcacgcggcagcgggtagcagtggcgacgccagaaatcggcgcaggcctggtagcgtagcagagactcatcttcaatcagctgctgctcaaacagcatgccggattcaaaggcattcaggttgagcatgcgctggcaaaagccgtgaatagtaaagactgccgcttcatccatctgccgttcggctaacaacaaccactgcgcggcttgcgctttatcgtcgatctcttccagcaggcgttcgtacagtggattgtcggtggtttcacgcagacaggcgatgcgcaactcgtggatattgctacggatacgaccgcgcaattctgccgtggcagcctcggtaaaggtgaccaccagcagttcttcaacggtcagcgggcggggaaaggcggcggaaccgcctagtccaagtaacaggcgcaaatagagcgccgcaatcgtaaaggttttgcctgtgccggcagaggcttcaatcaggcgctcaccctgtaagggcaagcgcaaaggatctagtgtctcggcgacatcactcattcttttcactcatcaggggcattgtttgctgcaacgcgctgacgttctcccacactttccagccttcagggtgtacatattcggctttcccgttctggctgccggaaatctgcgacagaatagccatgccttgcggctcgaccaccgcctgatggaagaaatcagcaagtttttgcggcgtcagcagttttatctgggccacgattttatcacgcgaatcgaagcgcatattgccgcgatcgaaatctttacttaacttcgatgcttcttcgccgagcgtttgcggtgcctgcagcatctgggtaattaccgcctgctggatttgcgcaaactcatctggcttcatcgctcgcaattttgcctctgcggttgggaaaaacgccttgtaacgctcccacaagaatgaaggctgtttatcattgctttgcaaaaggaagcccatgccccactgacgccccacgctcattggaaacgcaaacacggcatagcccaattgttcttcggtacgcaactgattgtagaaccacggctgtacgatctgccccaacagagagctataggctgagctggtgtattcatcgtagccagtcggtacaaataccgctgccagtgcggagtcggtgctgttaccggctttttcaaagatgacggattgttttttatcgaccactacatctttgtttcgacaccactctgaaccatcagcgcccaactgtttttgcacatcgcgtgccagcgttgttgcctgggcctcggtcatgttgccgataaccataaactctggtcgagcccctgattttaaggcgtcgcgataggccagcacctctttcaacgtaatggagggcaaaattttacgccgttcatctcgcgagaagtacggcacttgcgagagcatctgcgcgggcataatcgcctgctcaaacgctttacccttttctgcggaatccatcatctggttataccaggacttcgcctgctcaagctgatcttccgtggcggtatagctaaagtagccttccagcaatgcctggaacagctgcggcagacgctgggtgtaaccattagcattaaccataaggccgttgttagcgttggtggaaaaacttatgccaccaaccgacgcctggttgcttaactgatcaagcgccagccctgcgagataatcattgagcgcaaacatcacctgattgcgggcgctgtccatggctttcggattacgcaaaatcaggctgacatcagctttgggctcgctggcaaaataacggcttggcgcatacaccacgcgcagattcgactcatcaacaatcagctctggatggtcgtatttcttctctgacttaatcagcgagaaatcatcaggaatataagggttaagctctggcaaagagagcgcaatgtcggcggcttttttctgccagtcggcgaaagtttgtgcgctgattttatcgacctgatacggcgcatcgacaaagtaagccgttttgttgtgcggctctttcgggctgatataccagatacgcgcattctgcggcgtcatcatcgccagacgttcctttactgctttagcatcgtaccgatcggcaatattgactgcatccagcgtatgctcaacaggaacgcgaatcatggtatctgccagccattcgacgtaatccatatcacgggtgatcgacggataacggaagtcgatatccagcacattcgccagttcatcgaagtattgtttatcaatgcctttttcacgtaacagattgagatagctaaaaattgccgccacaacctgatcgcgattagccaggcctttatcggttaaagacgcagagatcgctaatacgccgctgttgccgttgacgataggatcggagttggcgctaatgccctcaactaatccctgcttttgcagccagtcagaaagtgtacctgggctgcgattgccaatcagataggtaatcaattcatcggttttactacggaacttcgctgagttgttatcgatgcgaaactcaacgcgcaacactttacgcggcagcgcagggacgtaatgaatgataatgcccttttgcgcgtcggtgactaccggcacggtgatttccggttttttgctctctttgttcggcacgcgaccaaaggtgtccgccgccatttttgccaactccggcagcggtttattgctgtaaataaccgccttcatcagattggcggaatagtacttctcgtggaaatctttcagcgcctgctgcaccggattaccaggtttgtcgcttaaagtttcgaggttaccaccagaaaactttgaaccggggtgtgccgggttaatggtttctgcgctgacctgcgccatgcgcatcccgtcacgcgtacgcgccatggttaattcggcattcactgcattacgttcacgttcggcgtatttcttgtcgagcaagggttctgcaatagcgtccgccaggcggtctaccgcaccgggcaaggcgtcgttctcaacttccagatagaaagccgtgcgatacggtgccgtgctggcattgtgactgccgccgtgcattttgagatattcggccagactgtcagcctgcgggtactttttcgaccccatcagactcatatgttcaaggtaatgtgccagcccctggtacgcctcgggatcttccagcgacccaacgggcaccaccagcgccgagagcgatttaaccgcctgcggatcagaaaccagcaagaccaccataccgttatccagacgtatagcctgatactggcggttatctttatcacttttacggatggtttcctgaatcggctgccatcccgtttctgcctgacttaagggtgcccaaagggcaacaaacaacaataatgctttgaaccaggtgctgcggggcattcacggacctcataatcaactttattttctggccagattcaacaggttaacgcaaatcatctgccagaatttaatcttgtgctgcacgagtcagcctatgtctatatatccatcagtccgtgactggtgcgcatcataatgtaagcgaatgaattgcgcaatttttatacagcactcatgactgattaaagcgaaacagcggtaacaggaaacgttgcgactgttcaacgatggcctccattgtctctggtgttaattgccgccagagccgttgataccagatatcatcaccttcgccacgcaccatcatgttgccttcgtaagcctgaaggaatttcgtacgggctttttgcaacgtggaatcgtcatccagcatggcatcgttttgcgcgtcataacaggtttttagccacgcgccgccactttcaggtaacaccagcaatggcgcggacattccttcacgatacccctcaatcagttgtgagaggtaatgcaaagcctgttcggctgcaagcggcggaaaacgccactcaccgtctttgcgtagaaaaaggcgactttcgccattaccaccgctggcacagtagacaaggtgttccagccaaagttgcattccctgcgccacacttaataaagagggacgccagcgcaacaggccatccggctgcacctgcggcaaccagccagttatctgcacaccgttgcaggcgagatcaatttccatactctgccccggctggcgacaggcaatgactctgtcggcaagctgctgcatctcctggcactgtgtttcccagaaaatttcaccaaaagcgccatacggtaaatcccctgccgcccggaagcggcggaacaagcgttcggcatcatcctgctcaaccagtgcattcaataactgctgattgatttgataacggctaagtccttccagaataaatggctcggtgtctgggatttcgctgtcttcagtacggaagttcacctgcaaacgcatctggaagaacgcccgcaccggatgtgcccagaatcgttgtagcgtttccagcggcacggtttccggtaaggtaaacggcagcggctgaacaaattcagaatgtgctttaccagcctggctggccgcaggtagccattcacgagcatagctttgtcgttcgcctggctggtagttttgtggatcaaacggcatccgggtatggaggcaagtaagatgcgcttttacccttgcctcgctttcatcacagttgagcgcttcatcgcccggtagataatgactttgcccgatgtagtcgatcagttcctgcaccagtaccgacgggaaacgttcactgttatcctgaatggaacgcccgatatagctgatatagagtttttgctgcgcggcaattaacgcttccaggaacaggtagcggtcgtcatcgcgacggctacggtcgccacgcttcggtttctggctcatcaggtcaaagcccaatggcgcaagctgacgtggataaacgccgtcgttcattcccagcaggcaaaccactttgaacggaattgaacgcattggcatcagagtacaaatgttaaccggtccggcgagaaaacgctggctgatacgttcttgatccagacgctgcgccagttcatcacgcaatagtgacagcggcaccgcgtcgccatactgcgcacctaaaccttcggcgataatcgcctgccattgttgttcgatcagcgtcatcgccgcttcggtttccgcatccggcaggaagaaggcgttgagcatatcgcgacaaaccggcaaccactcttctagcggacgctcctgtgccagcccgcgacgccagatgtttagctgcattagcagtgaagccagatgccccaccagttctgcaattaagccgctcgattcatcataaggtagaaccgattgccactcgccctgcgcgctctccatcgcgtagcccagcaacatacgcgtcaggccaaatcgccaggtgtgttgtccggtggcggggagttccagctcgcgaacgttgtcgtcatctatcccccaacgaatgccggattcgttgacccactggcgtaaataacgcagcccttcttcggtgatgtcaaaccgcgccgccagcaccggcacatccagcagcgccagcacatcctctgacacaaagcgactgtcaggcagtgataacaggctgataaacgcttccagtaccggatgtgactgccgcgcacgacggtcggaaatggcgtaaggcaggtaacgatccgcaggtgcgctaccaaacactgcctgaataaacggactgtagctgtcgatatcagccaccatcacgatgatgtcgcgcggagtaagtgtcgcgtcttcctccagcatcgccagcaagcgatcgtgtaaaacttcaacttcacgctgcgggctatggcaaacgtggaaggtgatactgctatccagtggatcaagcgggcgtttgttatcgctacgggaaaactcttcgatgttcacacccgcaacggcgcggttttccagttccagaatgtcagactgaatgttatgcagcaggttatctggcgtgacatcgacaaaggcgtccagctcctggctgctctccaggtcagaaaggagataaatgtagtcgcgcccaagcttaccccatgaagccagcagcgggttgccgacatcctgttcaccatcgctgttaaagagctgcccggcattttcgctatcacgaaatagcggcaattcgcgatcttcaaaactgtgtcgacgctgacgggtcagcagtttcgccagataagcaggatctttaatatcgccccagtaataacggcaggggttggtaaacaggagatggatttcaatatgtttacccagcgcctgtagcgcctggagataaacaggcggtaacgcggaaataccgcatataaagacgcgcgaaggtaaccccggcgggcaggtcgtcgcggactccagcgtttcgataaagcgctgatagagattggcgcggtgccaacgcggttgtccgagttcatgggtatattccaccagcgccttccacaacggcgcttgccaggcctgtgcctctcccagcccttcaaccaaatgtcctgtttcccagtgtgccagccagtccggacgatagaccagatactggtcaaacaggtccgccgcttttgaggaaagctggaacagttttcgcttgtcgctatcgtcagtcagataatgccgcaacagggtaaagtcttcgcgctccagcaattgcggcagcagagtcatcagtttccagctcatgctctgtttgttaaaggcactctctttggggatctccggtaacacccggacgaacatatcccagataaagctcgctggcagcggaaaatcaatgtttgccgcaataccaaacttttgcgacagggtcatttgcagccactgcgccataccggtactttgcaccagaatcatctctggttcgaaaggatcgtccagccgttcgcgttcgacaataaactccatcaacgcttccagcacgtccagacgattggaatggtagacccttaacatagcggctcctgactactgacgattcgggcaatgcaggcgggtcatctcgccttctctgcccccgggtgaaactagcgtaacgctgatgctgacacatcccgcctgcgatgtctgcattcggttgacctgccagttggcaggtggcgaaatcgcgcgcagttgcgtttgctgccaaccatgccgccagagctgttggtactggtttctgctggcgagactgttcattaatgttcgctggatacccgataacgcagtgacaatcatcaccatcagcaccatcgcaaccattacctccggcaggctaaagccttgttgattcttcagggaagctgacataatgccccctctttcagcggacaaaaatcgctccagccgcgtggcgaaaaaacaatttttccatcaatgacttcgcctgttcgccacaacgaaacgccttcataaccggcaatcaataaggcttcattatctgccagtaaacgcaaacaaacctgggcatcggttccagcgtactgcgagcactgaactgctggctgcgtctgccaggagtgcatttttccccacgccagcgccgactgaacgatggcctggcggcgcaatgactgactttccatgctcacgcgagaggcaaaactgcgatcctgctgactcattccttgcaatagcaagctacccaaaaccagcagcatcaggaccagagccagtgacgaaacacctttttcgcggttcacaggttgaatcctgtcacgctatagctggcatccaccacggtttgcggttcagacttactggcagcacgcatattaaccgtcaacaccggcgagaagccgctgacatcctgacgtacgacctgaaaagtgtcgataatgatggcatccggattagtgactttatcccagcccttaccttcacaggatgtcgcaccgcgtagcgtttccagcacatgctccttcagacgaaatccaatctggtcggactcttttaccggttcgcgatcccagataccgttactgttcgcatcccactgcacaatgatacagtcaccctgtccgacaatttccagcccttcgccggtacagctgccatgacaataacccgccctctggagatgcttcgcgacggtaaatacccgcagccagatttcatcttccagcgccagcttacgggtgcccgttaaactttcacgctgtaacgcaggcagaaagcgtgccgctcccagcaacaatacgctactgatcgccatagcaatcaacacttccagcagagaaaaaccttgctcttttacaggcatccttctgtttctccttgctgacaaagccggagtcttccccacggcgaaaccaccagccaccactcgcccgttgagtttttgaagcgaatatgcccggcccatgcggtattgcgcaggccaaagaaagcaagcgaaggtgtcaggtcgctcatttcgacttcgggccagcgtggcacaaagaccaatggtgaactgccatgacaggtattggccccagcagcggaactcacaaggcaccataacgtcccctccctgataacgctgatactgtggtcgcggttatgccagttggcatcttcacgtaaatagagcaaatagtcccgcgcctggctggcggtttgccatagccgttgcgactgctgccagtattgccagccatagagtccacttgcgcttagcatgaccaaaatcagcatcgcgaccagcgtttcaatcagcgtataaccacgttgtgttttcatgccggcagtatggagcgaggagaaaaaaagacgagggccagtttctatttcttcggcgcatcttccggactatttacgccgttgcaggacgttgcaaaatttcgggaaggcgtctcgaagaatttaacggagggtaaaaaaaaccgacgcacactggcgtcggctctggcaggatgtttcgtaattagatagccaccggcgctttaatgcccggatgtggatcgtagccttcaatctcaaagtcttcgaaacggtagtcgaagatggattcgggtttacgtttgataatcaacttcggcagcggacgcggttcgcggcttaattgcagatgagtttgatccatatgattgctgtacaggtgcgtgtcgccccccgtccagacaaaatcgcccacttccagatcacactgctgcgccatcatatgcaccagtaacgcgtagctggcaatgttaaacggcaggccgaggaaaacgtcacaggagcgctgataaagctggcaagagagtttgccgtctgccacatagaactggaagaacgcatggcacggtgccagcgccattttatccagttcgcctacgttccacgctgaaacaataatgcggcgcgaatccgggtcgtttttcagctggttcagtaccgtagtgatctggtcaatatgacgaccatccggcgttggccaggcgcgccactgtttaccatacactggcccgaggtcgccgttttcatcggcccattcgtcccagatggtgacattgttttcgtgtagataagcaatgttagtgtcgccctgcagaaaccacagcagttcatggatgatggaacgcaggtggcaacgtttagttgtcaccagcgggaatccatcctgcaggttaaaacgcatctgatgaccaaaaatggaaagcgttccggttccggtacggtcgtttttctgtgtgccttcgtcgagcactttttgcatcagttctaaatactgtttcatggttcctcaggaaacgtgttgctgtgggctgcgacgatatgcccagaccatcatgatcacacccgcgacaatcatcgggatggaaagaatttgtcccatgctgatgtactgcacccaggcaccagtaaactgcgcgtcgggctggcggaaaaactcaacaatgatgcgaaacgcgccgtaaccaatcaggaacaaacctgagacagctcccattgggcgcggtttacgaatatacaggttgaggataataaacagcactacaccttccagcaacagctcgtaaagctgtgatgggtggcgcggcagcacaccgtaagtatcgaaaatggattgccactgcgggttggtttgcagcagcaaaatatcttctgtacgggagccagggaacagcatggcaaacgggaagttcgggtcaacgcggccccacaattcaccgttaataaagttgcccagacgcccggcaccaagaccaaacggaatgagtggtgcgataaaatcagagacctggaagaaggaacgtttagtacggcgggcgaagataatcatcaccacgataacgccaatcaggccgccgtggaaagacatgccgccgtcccagacacggaacagatacagcggatcggccataaactgcgggaaattgtagaacagaacataaccaatacgtcccccgaggaagacgccgaggaagcccgcatagagtaagttttcaacttcatttttggtccagccgctgcccggacgattcgcccgtcgtgttgccagccacattgcaaaaatgaaacccaccagatacatcaggccgtaccagtgaagcgccacgggtcctattgagaaaatgaccggatcaaactccggaaaatgcagatagctactggtcatctgtcaccacaagttcttgttatttcgctgaaagagaacagcgattgaaatgcgcgccgcaggtttcaggcgctccaaaggtgcgaataatagcacaaggggacctggctggttgccggataccgttaaaagatatgtatatgatccgcgctataaccctccgcgaatcagcccgcccatgccgcgacgctccataaaggctgcaacctgatggcgaacttcggtcgccagttgcgcttccagactacgctgcgcaagattttctgcttcggcataatcaatgcgccgcagcaggtattttacccgcgctacagaacgtccgttcatagacagatggcgatacccaagcccaatgaggattgccacgcacatgggatcgcccgccatttcaccgcacaaacggagatcgattccatgtatttccgcttcccgggcgatcatcgccagagctcgtaacattgcaggatgaagactgtcataaatgttcgccacccgggtattgttgcgatcaacggccagaatgtattgagtcagatcgttggtgccaacagagatgaaatcgacccgctttgccagatgcggcagcataaataccattgacggcacttccagcatgatgccgatacgtggtttgggaatttcgtaaccgatcatctcctcgacttcacgtccggcacgttcaatcaggcggcgtgcttcatcaacttcatcgaggcttgtgaccatcggcaacagaatattcaggttgcccgtagcggcattagcacgcagcatcgcccgcacctggatcaagaagatctccggctgatcgagcgtaatgcgaatcccacgccaacccaggcatggattctcttcgctgatcggcatgtaaggcagctgcttatctgctccgacatccagcgtacgcaaggtgacgggtttatcattgaacatttgcagcatcccctgatactgcgccacctgttcttcttccgacgggaaaccactttgcagcatgaatgggatttcagtgcgataaagaccgatgccatcaatacggctgcccagtttttcttcatgttccgggcttaaaccagcattgagcatgacttttatacgctcaccgctttttaactgcgcgggtaaattgacgtcatcttccgccagacggctaagctcaatctcttcactaattagccgctgatattcttgcagcagtaccggctccggatcgaccagcaattcaccgcgatagccatcaacgatcagcgtcctacgatgcagcaccgaaggctgaatatccgcgcccatcacggtagggatccccagcgcacgtaccatgatcgcagcatgggagttggctgcgccatctcgcacgacaacaccgactaagcgatcctggggcagctcagcaagagttgtcgctgacagttcatctgccaccagaatgaaacgttccggccaggcgttcggcccttgattagcgtcatcaagatgaaacagcaatcgctgacccagcgcacgtaaatcgccagcccgctctttgagatagttatcgcttagcgcggcaaactgttcggcaaatttttcaatgaccgtttttaccgcccactctgccaccgagcctttatcaacctcggcaaacaattcgcgacgcagccgggtgtccgaaagcaggtgcgagtaaagatcgaaaatagccgccgtttctttttgtgcaccggcggcaaagcgtttgctgtagcggcgaaactcgtttgccgcttcttccagcgccccggtcagtcgttcgcgttccagagccggatccagcgttgatgcctgatacacctgttccattaaaggtaacgtggcatcctgccagccttcggcaatcgccacaccaggtgctgccggtaatgcgcggattcgcgtctggcgatattgcccaaacaaggcagtcaactgcgactgagaaagaatagctgccatctgggtggcaagcgtcaccaggaaggattcttcactttcgtcatactggcgcaactctcgttgctgtaccaccagtacaccaagcaactggcgacgttgaataattggtacgcctaaaaacgcgcggaaacgttcttcttttacggaggggatgtatttgaagctggggtgcttttgcgcatctgcaaggtttatcggttccgccagcctgccaaccaggccgacgatcccttcatcaaacgcgagcgttacagtgcgaccgcgtggttttttcagcccccgggtcgccatcaggtagtaacaacgtcgatcatgatcggccaggtagaccgaacagacctcggtatccatcgcaagacagatgtcggtaaccagaatatttaacgcctcattcaggcgtggtgcgctggctaccttttcgactatttcgcgcaggcgagtgagcataattggcgtgacttaacctcttttacgtcgataagcagatgcgttttgtggttttggcgtattttcctgcagtgacatcaccacactcgcgaactctttcattaccctacggtagacatcacgtttaaatgacaccacctgtctgaccggataccagtaacttacccatcgccagccgtcaaactctggtgtactgctggtttgcatattgatttctgcatcgccgctcaccagctgcaagagaaaccatttttgtttttggccgatacaaaccggcttcgtgtcccaacgcaccaaacgtttcggtaatttgtagcgcaaccagttacgcgttgaagcaaggattcgaacgtctttgcggcttaatcctacttcttcaaacaattcacggtacatcgcctgctctgcggattctccggggttgattccgccttgcggaaattgccaggagtgctgaccaaatcgccgggcccacattacctgcccctggcgattacaaatcacgatacctacgtttgggcggtagccatcgtcatcaatcaccggactacctcaatataaagctttatatatgaatgattgtttcatactccaggaagacggtaaaccactctctgcagggcattacacactaataacaattgaataactcacagttatgtgcagagttataaacagaggaaggggtggatagccgtttttattcaccttttctgtggatagagttgtgaagaactacggaattactacgggaaaacccggagcattctgaataagcccgatatagacattttaaaatattcattatcagtcaatgcattacatgtaattttagtaatgaaaaagagtaattcgtgacccaggtcacacctctcatttacgggttggcgaaagatcaaccaatgccgtatttatccacagaatgtgccactaagttaagcactgaaccactaaaaactggagtttcgtcgcacgtcaaggctgtaaatggaaacagtagtggaggtttttcacagttatcccagctttctgtggataacatggtgtaagatcctgtttattttcagtgaccagatttggaaaacccgttgcagtgttgcgcaactcgattaccggcaacctaaaaagcaatataaatcagagaattgaacaacgcatgtggaaaaagttacactgcgaatattcggcacataattgctgtttgttttttaatcaaggtatcatgacatgtcccaacctcgcccactgctctctcctcccgaaactgaagaacagttgttagcgcaagcacagcaactttctggttatacattgggagaactggcggcacttgtcgggctggttacgccagagaatttaaaacgcgataaaggctggattggcgtgttactggagatctggctaggtgccagcgcagggagtaaacctgagcaagattttgctgctctgggcgtggaacttaaaactatccctgtggatagtcttggtcgtccgctggaaacaacattcgtttgtgttgccccgttaacgggcaatagcggggtgacctgggaaaccagccacgtgcgccacaaactcaaacgcgtactgtggataccggttgaaggcgagcgcagcatcccgctggcgcagcgtcgcgttggatcaccgttgctgtggagcccgaatgaagaggaagaccggcagctacgcgaagactgggaagaattaatggatatgattgttctcggtcaggttgagcggattaccgctcgtcacggggagtatttacagatacgaccgaaagcagcgaatgcgaaagcgcttaccgaagccattggtgcccggggcgaacggattctgacgctgccacgcggcttttatttgaagaagaatttcaccagtgcactactggcccgtcattttctgatccagtagccatcgctttgacctgccgctttccgggcatataattaccgcttcatttttttggcagggctttttagatgttatttgcatggataaccgatcctaacgcctggcttgcgctcggtacgctgacgctgctggagatcgttcttgggatcgacaatattattttcctttctctggtggtggcaaagcttcccacagcacaacgtgctcatgcgcgccgtctggggttggcgggagccatggttatgcgtctggcgctgctggcatcaatcgcctgggttacgcgcctgacaaatccgctttttacaatattcagtcaggaaatttctgcccgtgacttgattctgcttctgggtggcttgttccttatctggaaagccagcaaggaaatccacgaatccattgaaggtgaagaagaagggctgaaaacacgcgtttcatcattcctcggcgctatcgtgcagattatgctgctggatattatcttcagcctcgactcggtgattaccgctgtgggtctgtcagatcacctgtttattatgatggcagccgtggtgattgccgtaggcgtgatgatgttcgccgcgcgctcgattggtgattttgtcgaacgccatccttcggtaaaaatgctggcgctctctttcctgattctggtgggctttaccctgattctggaaagtttcgacatccacgtaccgaaaggttacatctacttcgcgatgttcttctctattgcggttgaaagcctcaacctgattcgcaacaaaaagaacccgctctgatactccgtacgctctcctgcgggagggcgtactcactcctgttaccctcacagtttaagattttcctgctttcaagatatataacgtcagtttataaacagactattatcataggtgggccaaatgaggataaccggatgaaaaaatgggcagtaataatttctgcagtcggactggcgtttgctgtttccgggtgttccagtgattacgtcatggcgaccaaagatggccgtatgattttgaccgatggaaaacctgaaattgatgatgataccgggctggtgagttatcacgatcagcaaggtaacgcgatgcaaattaaccgtgatgatgtttcgcaaattattgaacgttaacaaataaggtcagcatccggctggccttaagatttttctctttcccttttcccttccctctgccatttttatattccttatgtcgtgattataaaaaggaaacggctatgcaatatcaccgtataccccacagttcgctggaagtcagcacgctggggcttggcacgatgacgtttggtgaacagaacagcgaagccgacgcccacgcacaactcgactatgccgtcgctcagggcattaaccttatcgacgttgccgaaatgtacccagtacctccgcgccccgaaacgcaagggttaaccgaaacctacgtcggcaactggctggcgaaacatggcagccgcgaaaagttaattatcgcctccaaagtgagcggaccgtcgcgcaataatgacaagggcatccgcccggatcaggcgctggatcggaagaatatccgcgaagcgttgcatgacagcctcaagcgtctgcagactgattacctcgatctttatcaggtgcactggccgcagcgcccaaccaactgcttcggcaaactcggttatagctggacagattctgcgcctgcggtttcgctgctggatacgctggacgcactggcagagtaccaacgagcgggaaaaattcgttatatcggcgtgtcgaacgaaactgcatttggcgtaatgcgctacctgcatctggcggacaaacacgatctgccgcgcattgtcaccattcagaacccttacagtctgttaaaccgcagttttgaagtaggtctggcagaagtcagccagtatgaagggatcgaactgctggcctattcgtgcctgggtttcggcacgctgaccgggaaatatctcaacggtgcaaaacccgctggcgcacgtaatacgctctttagtcggttcacccgctatagcggtgagcaaacgcaaaaagccgtcgcggcgtatgttgatatcgccagacgtcatggactggatcctgctcagatggcgctcgcttttgtacgtcgtcaaccgtttgttgccagcactctgctgggcgcaaccacgatggagcagctgaaaactaacgtcgaaagtttgcatctggagttgagcgaagacgtattagctgaaattgaagcggtgcatcaggtttatacgtatcctgcaccataagattaacgccggttaaaaccggcgttaaatattaatgacggcgctgccagatccacagcgccgttattgccagcgcaaacagcgcaccgaagccaatgccaatgggcacgaccgggatgcctaccattaccgccagcgagtaaatgcccagcatcaacaacatggcgctgttttcgccaaggttttgtactgcaatcgcattccccgccccgacgctttttttaccccgctcctgtagcaacgcattgagcggaacgacaaaaaagccccccatcacgccaatcagcatcaacaaggcataggctggcagcagctcgtgttgcagggaaaaaatcagtaccaccacgccaatcaaaatcccggctggcatacagcgtgacacggtttccagcgtaactaacttcgctgccgcacctgcgccaaccacgataccaatcgctaccatcgcgttgagataggtgggcgtagcgttatcggtaatgcccagcgccaccggtacccacagcaccaacaggaaacgcagcgtgacacccgctccccagaataaactggtgcccaccagcgaaaaacgcgtttcaccattgcgccatagcgaggtgcaggcattcaggaaactgcgggtcatgttgatgagattccaggactgccccggacgcgccgccgccagtttgggaatgtagatattggcaacgaccgcaccaccgtaggccagtgcgcatgcggccagggcgacgaggacatgccagtcagccagcacaccaccggctacggaaccgagcaaaatcgccgctatggtagaagcttccattaaaccgttagctttcactaacttactacccgtggttaattcgccgagaataccgtatttcgccggtgaataggctgcagcaccaacacccaccagcgtatagccgagaaacggattgataccaaagcagatactggctgcgcccagcagcttcaggccgttggcaaacatcatcacccggcctttggcgaagctatccgccacctgcccgacaaacggcgcaaaaagaatgtaagcacctacaaacaccatttgcaggatgggctggctccactccggatagaactgcgctttcagtaacgccagagtggcaaacagtagggcattatcgccaaacgcagagagaaactgcgccacgataaccgctttcatccccttcgaccacaacgaagtgttagtgtgcactgactcactcatcgtgttgttccgcttcgtctacccagcttttcaacgtgacaaagtcaggtttgccgctgccaagtaatggcatctgtttcagatagcgaatatcgcgcggtacagcaagctccggcacgccgtgctcgcgggcatactgttgcaacttatcgcgcgtcagttcgttatctgtggtgaaaagcaccagtgcctcgcctttgctggcatcgctcttaatcgcagtggcatggactttatctggcgaaacaccaagtgccagttgttccaccatttccagcgacaccatttcgcctgcaattttggcaaagcgttttgcgcggccctgaatctgcacaaagccctgcacgtcaaaacgcacaatatcgccagtgtcataccagccgcgctccatttcgccgcgaacattctcggcggtgggcacttccagtacacctggcttctccacccgcagatagccgttcattatgttcggccctttcagttgcaggcgtccgccctcttcgataccaggaaccgacaacaggcgcgcatccattcctggtagaatacgccctaccgtaccgggtttcgccgccatcggtacgttgatagaaacgacaggcgcgcactcggttacaccatagccttcaaggatgcgcaggccaaatttatcctgccaaagctgtttggtactttcttgtagtttttctgcgcctgccaccacatagcgtagacgatagaagtcatacgggttggcgaaacgcgcgtagtgaccgaggaaagtcgaggtaccgaacaacacggtgcaactgcggtcatacaccaactccggcacaatgcggtaatgcagcgggcttggataaaggaacacttctgcacctgtaagcagtggcgtaaacaggcctaccgtcagcccaaaggagtgaaacagcggtaatgccgacataaagcgatcgttggtggtgaagtcggcaatcgttttaatctgctcgacgttcgccagaatgcttttatggctatggacgacgccttttggatggccttcagaaccggaggtaaagaggatcagcgcctcttcttccggctgctgttttacctgcgccaggcgcggcatcagcaaatgagcgaagatccatactttgtcggcagtggtgacatctgcttttaaatcttccagatagacccagcgcacctgagtaagttgctccggcagatgccagagtttgcctttatcgagaaactggcgggaagtgaagatggttttgatttcagccgccgtaatagcactggtcagcccttttaccccagcagtgtagttcatcattgcgggaatgcggcgacgcgcgatgaccccaaaaatcactgccgcactgatgcctgcattgggcagcattaagccgatgcgttcgccttcaacactgtatttttcaaggatgcgtccaacaaacagcgttttcgtaagcaatttgcgataggagtctggggtaaagttgacgtcttcgacacatttcttcccggctccgaagcggtacattgcactcagtaaagattcgtacagagtttcacgcgggcgcaccgccatacgcgcttccatcattatttgatgcagcatttcgccagcgattttgcgacggtcacgggcacgcggcgcatccggcatcgccacctgcgttggtggcaaaatatgcagagtaatttgcgggaacaagcgacgtttaaccagacctttcaggcggctgaagtgcgtaagttccgccccttcaatacgcacaggaataaccgttgcaccagacttcgccgcgacaaaacccgcgccatcgtagattttcatcagcgagcctgtagtggtgatgcgtccttcagggaaaatcaccactggtcggccctgttccaccagacgtaccagatgtttaatagccataggttgcgtcgggtcgagaggaacaaagtcgataaatgatttcagccaacgcatataccactgttggcttattgaggtgtaaacggcaaacactggacgcacaggtaaaaacagtccaagcaaaatgccatcaataaaagagacgtgattaggcgtaattagaacgcgctcgcccttcagtgcctgggtgtcacccgtaacgcgaacgcgatacaaaacacggcacaaatttcgaaaaaagctaaaaagcattccaactccctttgctctgattcagtaaaagcgaatggagggagattacacgagataaagaacgcgagcgacagtaaattaggtgcgaaaaaaaacctgcgcatccgcgcaggttggtgcaagagacagggtacgaagagcgtaccgaataatctcaccaatcaatacctctgggatcttgattgtggtctgcacgacgactcttcgccagcgagaaaacgcaaaggaatgaagggaaatgcaacgaggtgtgtaaattgtcggttactgttacagattgatgaccggcaaaaaaaaacctgcgcatctgcgcaggctggtgtaattcatgtgctcaacccgaagttgacttcacctatcaatacctctgggatcaccactttagcaacctgaagccaaacgccaccagcggtcaatcgcaacagcgtttcgcaaagtgtaaccaaaggtttgcaatctctttttttgtcttacttatttgcgtttggctcacattcccacgatgaaaacacgccaccccttgaaccaacgggcgttttccgtaacactgaaagaatgtaagcgtttacccactaaggtattttcatggcgaccataaaggatgtagcccgactggcaggcgtttcagtcgccaccgtttcccgcgtcattaataattcacctaaagccagtgaagcttcccggctggctgtgcatagtgcaatggagtctcttagctatcacccgaacgccaacgcccgtgcgctggcgcagcagaccactgaaacggtcggtctgatcgttggtgatgtttccgatccgtttttcggtgcaatggtgaaagcggtcgaacaggtggcttatcacaccggtaattttttattgattggcaacggttaccacaacgaacaaaaagagcgtcaggccattgagcaactgatccgccatcgctgtgctgcgttggtcgtccatgccaaaatgatcccggatgctgatttagcctcattaatgaaacaaatgcccggtatggtgctgatcaaccgtatcctgcctggctttgaaaaccgttgtattgctctggacgatcgttacggtgcctggctggcaacgcgtcatttaattcagcaaggtcatacccgcattggttatctgtgctctaaccactctatttctgacgccgaagatcgtctgcaagggtattacgatgcccttgctgaaagtggtattgcggccaatgaccggctggtgacatttggcgaaccagacgaaagcggcggcgaacaggcaatgaccgagcttttgggacgaggaagaaatttcactgcggtagcctgttataacgattcaatggcggcgggtgcgatgggcgttctcaatgataatggtattgatgtaccgggtgagatttcgttaattggctttgatgatgtgctggtgtcacgctatgtgcgtccgcgcctgaccaccgtgcgttacccaatcgtgacgatggcgacccaggctgccgaactggctttggcgctggcggataatcgccctctcccggaaatcactaatgtctttagtccgacgctggtacgtcgtcattcagtgtcaactccgtcgctggaggcaagtcatcatgcaaccagcgactaaccgcagttaaagcaattccagcgccagtaattcttcgatggtctggcgacggcgaatcaaccgcgcctgaccattatcaaacagaacttctggtaacagcggacggctattgtagttggatgacattgatgcgccatatgcccctgtatcatgcagtaccagataatcacctgccttcacttccggcaaggcgcgggtttcaacatttcccccttcctgctgggtaaagacatcgcccgattcacataacggtccggcgacgacggtttccaccgttggcgcgtgttccagagaacgaccatcagctgccagggcactgatatggtggtaactaccgtacattgccgggcgcatcagatcgttgaacccggcatcaaccagcacaaagtggcggctccccatttgtttgacgctccgcacctgagtaattaatacgccagactgcgctaccaggaagcgacccggttcaatttccagtttcacagggtggcccaaatggcgggcgatttgctcacgcgcggcattccacagaccataataatgttcggtatcaaccgcctcttcaccctgttgataaggaacagaaagcccaccgcccgcagaaatagcctgtaaatcctgaccgaattcgatgacctgacgcaccatagcaccacacacctgttccagatgggcataatcaacgccagaaccaatgtgcatgtgaatgccgaccagctgcagatgatgacgttgtatcacgtccagtgcggcgggcagatcggtgtaccagataccgtgcttgctgttttcgccaccggtattggttttttggctatgtccgtgaccaaaccccggattaacgcgcagccatacccgatgccctggcgaaacctggcccagttggtcgagcatatcaacagaacccgcattcaccggaatttgcaattcactgacgcgttcaagcgtcgcctgatcgataacatctgccgtaaaaacaatatcatcggggtgcgtttgcggattgtaacccgccgccaacgcacgctctatttcgcctaacgagacggaatccactttcacgccctgctcacgcattaagcgcaaaatatgaatattggaacaggctttctgtgcaaagcgcaccacatcaaactgtttcagcgctgcaatctgccgacgaataatttgcgcatcgtagacccacaccgggcagccaaattcagcgggcaaacgcagcagattttcggcggtgagatcggtatcggtgctgaacagtgaatgtggcatagcaaactccagataagtgctttttttatgattacgccacatcataaaaagaataaaaaatatcgatttatgtcgagtctatgcaaaaatgatatggattaccggattgcgagagagcgctaatggccgccgttaacttacgtcatattgaaatttttcatgcggtaatgaccgccggaagtctgactgaggcggcacacctgctacacacctcacagccaaccgtcagccgcgaactggcgcgctttgagaaggtgatcgggctgaaattgtttgagcgcgtacgtggacgattacatcctaccgtgcaaggactgcgtctgtttgaagaagtgcaacgatcctggtacggactggatcgcattgtcagcgccgcagaaagtctgcgcgagtttcgccagggagaactgtctattgcctgcctgccggtcttttcgcaatcttttttaccgcagctcctgcaaccctttctggcacgttatcccgatgtcagcttaaatatcgtgccccaggaatcaccgctacttgaagagtggctctcggcccagcgtcatgatttaggactcactgagacgctccatacgcctgcgggaacagaacgtaccgaattactctctttagatgaagtgtgtgtgttgcctccgggtcatccgctggcggtaaaaaaggtattaacgccagaagattttcacggtgagaactacatcagcctttcccgtactgacagctatcgccagttgctggatcaattgtttacggagaatcaggttaaacgacgcatgatcgtagaaacccacagtgccgcgtcagtctgcgcaatggtacgggcgggggtaggtgtttcggtggttaacccgctcaccgcactggattatgcggcaagcggtttagtggtgcggcggttcagtattgcggttccgttcaccgtcagcctgatccgccccctgcaccgcccgtcatcagcgctggttcaggcgtttagtgagcatttacaagcggggttaccgaaactggtcacttctcttgacgcgattttgtcgtcagctacgacagcataaaagcgacagcatcctcggcatggatcgccgcagtatcaaacacaggcaaaacactgcgctcttctggcaccagtaaaccaatttctgtgcagccaaaaatgacgccctgtgcgccctgttctgcaaggcgagcaatcacttgcgcataataagcgcgtgacgcttcggtaaattgccccagacacagttcttcaaaaataatctgattaatcttcgcccgttcatccgcttcaggaataagacagttgatggaaaattgttccgtcagccgcccgcgataaaaatcctgttccatggtgtaacgcgtacccagcagcgccacacgagtcattcctgccccggtaattgcacgtccagtggcgtccgctatgtgtaagaaaggcagagagcaacgagactcaatgacatccgccactttatgcatcgtattggtacataacacaatgccttctgcgcccgcccgctgtaagccaaacgccgcctcagccagaatatccccggttttgtcccactcaccgcgacgctggcactcttctatttcatgaaaatcgacgctatgtagcagcacttgcgcagagtgaagcccaccaagccgctgtttaatgccttcatttatcaaacgatagtaaggaatagtggattcccaactcattcctcccagcaaaccaattgttttcattcctctctcctgatgtgtgttaccgcaacaaggctgaataaggaacgagacaaacgcctcaacggccaggtgcccaatctctattaacgaaaaaagggccggatgtacagcacatccggcccgtgaaatcagacgccgatatttctcaacttctcgcctgccatcagtttgcgttcgatatgttccagggtgacatttttggtttccggaatgagccagaaagtgatgcccacaaacgcaatgttcagcgcagtgtagagccagaacgtaccggcagcgccaatgctgtcgagcagcgtcaggaaggtcgcgccgataatcatattcgacacccagttcgtggtggtcgaacaggtaataccgaaatcgcggcatttcagcggctgaatttcagagcacaggatccacaccactggcgcggcgctcatcgcataaccggcaatacacatcatcgtcatgccaacagagagccatgacaggccactggaagccgtgccgttatcaaactgcatcagacaatagcccagcaccagagtgcctaacgccatcacgctgaaaccaattttcagagccggtttacgccctgctttatctaccgtaaacaccgcaataaaggtggcgaacataaaggtcagccctacgaccagagtcgcaatcatctgttgttctgtcgtcgtaaagcccgccattttgaagatacgtggcgcgtagtacatgatgatgttcataccggtaaactgctgcatcgcctgcaacaacataccgagaaacacagcacgacggacgttacggttgatcttaaacagtgcccaaccgccctgttttaacttcaggctttcacgaatttcgttgagttcttctcgcgctttttccgacgtatcgcgcagcatacgcaatacttcttccgcctcaatatgacgccccttttccgccagccagcgcgggctatttggcaggaagaccaccagaataatcagcaggactgctggtaaagcaagaacccccaacattgcgcgccagttaccgctataactgaacgctgtatcggataaaaacgccagcacgatgccgagtgtgaccatcaactggtacatactgatcatcttaccgcgaacgttttcacttgccatttcagaaagatacagaggagcggtgtaagaggcgatcccgacagcaatgcccagcaccacacgagcggcgattaacatctctacgctggtcgcaaaagcggaccctatcgagccgagcacaaacaggatggcccccgccatcaggctgtatttacgccccaggcggaacgacagccaaccattaaacagcgcaccaattgctgcgccgagcatcatgctactgaccacccattcctgcaaacggctggtcagcacaaagtgatcggtaatgaacggcaacgctccggcgattacgccgatatcaagaccaaataacaatcctgcgaccgcagcagctaccgaaacaaacatattcatacgccgcgtatcccgcaaagaacgtggcgttaaagcagattccgtattgatagtaaccattttttcctgccagcagagagtaagacatagtgaaaaaatacgtgaacaattcacacaggtgtcaggtcggaaatagcataaatatggattaaattgctgcgacatgtcgttatgtgatggatattccaattttcaaattaagttgaattattgagattattattaaccaactaattttaaagaagataaaattcataaagttcattaattgataattgatatggattatttcataaccatgatatggattatgatgatctacaggtataaaaaaccctgccatgcggcagggtcataaaagtaagaagaatgaattaacgcgccagccaaccgccatccacggcaatggtataaccattcacataatctgaagcgctggaggcaaggaacactaccggccccatcaggtcactcggcagtccccaacggccagctggaatgcggtcgagaatttccgcgctacgttgttcatctgcccgcagttgttgagtattgttggtcgccatgtaacccggagctatcgcattaacattaatgttgtgtttagcccattcgttcgccatcaatcgcgtcacgcccatcacaccgctttttgatgcggtataagaaggcacacggatcccgccctggaaggagagcattgacgcgatattgataatcttgccgccattgccttgcgcgataaagtgtttcgccgctgcctgagacatgaagaatacgctcttgatattcaggttcatgacatcgtcccagtccttttcgctgaactcgagagcgtcttcgcggcgaatcaatccggcgttattcaccaggatatcaatatgaccaaactccgctaccgcgcgatccagcagtgctggaataccatcaatctttcgcagatcggcggtcaggcttaaaaaacgacgccccagcgctgtgacctgcttgatggtttcagtcggttcaacgatgttaatgccaacaatgtcacagcccgcttgcgccagccccaacgccatcccctggcccagtccagtatcacaaccagtgacgaccgcaactttaccttcgagagaaaatgcacttaaaatcataacaataccttattcgtttatgccgacaactagcgcaaatctttaacggccacatggtccatatcatcaaagacctggttttcaccgaccatgccccagataaaggtataagctttggttccgacgccggaatgaatcgaccagctcggggagatcaccgcctgctcgttatgcatcacaatgtgacgcgtttcttgcggctgccccatcatgtggaaaacgcaggcgtcatcatccatattgaaatagaaataaacttccatccggcgctcgtgggtgtgacacggcatggtgttccacaagttacccggagccagctccgtcagccccatactcaattggcaggtttccagcacatccgggacaaaatatttgttaatagtgcgacggttactggtgaggttatcgcctaacgtgactggagatacttcgtccggggtgacttttttggtgggatacgtcgtatgcgcgggtgcgcaattgtaataaaacttcgccggagtggcggtatcatcactggcaaagacaacttcctttgcacctttaccaacatacagggcgtcgcggtgaccgatttcatagcattgaccatcgacagtaatcgtaccggcaccgccaatattgataacacctaactcgcgacgttcaaggaaataacttacgccgagttgtttacccacttccccgccaacggaaaccgttttagttaccggcataatgccgccaacaataatacggtcaatgtggctgtaaaccatggtgtactcatcggcgacaaatacctcttcaaccaaaaattcattgcgcagcccttgggtatccagcgtttttgcgtgcgcactgtggatgctctgtcttacgtccacatcaacctccgataatcagtgaagcgtgaaaatagaaaacgatagtgaaacactgtttcgttttctctataaagggatgatatgcccatgggctagggttttcaattaaaaataaaacaatgtttcatttttaatttaaggattaaaaaaagtgcagtgtcgatcacgaatatgtcatgagaatggaaaaatgagggagcccagaaaatgtatgtcgacttgccagccatcattattcaacagattaatgacggcagatatttatcggtaaggaggaaatgcagagctactcgtcacgttcaatggtcaatgccacgccctggcccccgccgatacaaagcgttgccagccctttgcgggcattacgtttcaccatttcatgaaccagagaaaccaggattcggcaaccggaagcgcctatcgggtgaccgagtgcgatcgcgccaccattgacattgacccgacgctcatcccactcaagcatcttgccaaccgaaagcgcctgtgcagcaaacgcttcattagcctcgataagatcgacatcagccaactgccagcctacacgctccaggcaacggcgggtcgcatacaccggcgcaattcccatcaatgccggatctacaccaacgctggcaaatgcgcggatgcgggccagcacgggtaaattcaacgctcgtgctttggcttcgctcatcatcattaccgcagctgcgccatcgtttatggatgatgcattccccgcggtcacagaaccgagactatcaaatgaaggatttaaacgggctaaaccttctgcactggcgtcagtgcgtggctgttcatcggtatcaacaaccaacgtctgaccgttactttggatcattaccgggacgatctcatctttaaatcgtccggcgtcaatcgccgctcgcgctttttgttgcgagctaagtgcgtaagcatcctgcaactgacggctgatgccatattcgcgagccagattttcggcggtgacaccaatatgataatcattgaaggcatcccacaacccatcatgcaccagattgtcaaccaactggctattgccaagctgtgcaccggtgcggctatcagtcagaacatgtggtgcgcggctcatgttttcctggccaccggcgatgacaatatcagcctcgccacactgtatcgcctgagtagccagatgcagtgctttaagcccggaaccgcaaacgtcattaatagtgattgcagaaacgctattaggaagaccacctttaatagccgattgccttgccggattctgccctgcccctgcagtcaacacctgaccaagaattacttcatccaccgcatatgcaggaacgccggtacgttctattaacgctttcacgaccagactaccaagttccacggcggaatgacccgctaacgcaccgcgaaagcagccgataggtgtccgtaacgccccgacaatcacaacgtctttcatcacaacctcgcaccaattaacagtgcaatagtaaatgattgttaattacagttatcttaattgtttaaaaaaagtgatttttatcacaaaggaaatatgcctgagcagtagtcagagtcataactggcacgtaaggtttgcaaccactaacccaccaatagaggggtagatagggcgttaatctcccatacttaacctggtttatggtaaattgccctccattttgtttaatttgtagatgatacgttcagataatgtctaatatttggtctaaagaagaaactctgtggagtttcgcgctctacggcacagccgttggtgcaggcacgctcttccttcctattcagttaggttcggcaggggctgtggtcctgtttattactgctctggtcgcctggcctttaacatattggccacataaagccttatgccagttcatcctctcatcgaaaacatcagcaggtgaagggataacgggcgcagtaacacactactatggcaagaagattggttatctgattaccacgctgtacttcatcgccttttttgtcgtcgtgttgatatatgcagtggcaattaccaactcacttacggaacagctggcaaagcatatggttattgatcttcgcatccgtatgttggtgagtctgggtgttgtattaatcctgaatctcatttttctgatgggacgccatgcaaccattcgggtaatgggttttttggtattcccattgattgcctatttcttatttctttccatttaccttgtcggtagttggcaacctgatctattaacgacccaggtagagttcaatcagaatacccttcaccagatatggatatcgattcccgtgatggttttcgcctttagccatacgcccattatttctacgtttgccatagacagacgtgaaaaatatggcgaacacgctatggataaatgcaaaaaaattatgaaagtcgcttatctcatcatctgcataagtgtactgttctttgtctttagctgcctgctttctattccaccttcgtatattgaagcggctaaagaagaaggggtcaccattttatcggcgctttctatgctgccgaacgccccagcatggctgtcaatttccgggattattgtcgcagtagttgcgatgtcgaaatcattcctgggtacgtactttggcgttattgaaggtgccacggaggtcgtcaaaacaacactacagcaggttggtgtaaagaaaagtcgtgcatttaaccgcgcactatcaattatgttggtatcgctgatcaccttcattgtttgttgcatgaacccgaacgcgatttcgatgatttacgcgatcagcggcccgctcattgccatgatacttttcatcatgcctacgttgtcaacgtatctgatcccggcgcttaaaccctggcgttccatcggaaatctgattacgctgatcgtgggtatcctgtgcgtatcggtaatgttctttagctgatatccattgtgaatggttcaaaattgctacaattttgaaccattccagttttcataatgttcattcgttattattccgcactatcacttccctcatcatatcctagtattatcagttagttaaacacacaaagagatctgaacatcttaaataagactatttaagatgcataacttagattcgcaagatatcttccggtcattcaaaaacaatttgcgatatagatattctcataccatgagatagttatctgaaccaccctcaaccaggtaagattaaatcagtgaaacataatcatatttaataacgagaaatgcattttaaaatgtcttaatcagaattatagcaaatacagattaatcgcaatttttcccagcaaaattacaaaatcatggtgtattgacatcatcaatcaccaatgaaattatgcaattatatacggatagggaggttcttaacatggggctttgtagtcgttataaaagtcttacatgcaatagttgctcaatgcattgccaaataatgccagaagagtcaccgcgtttgcagtactgcgcaaactcgtgtttttgtatgtggcccgaagaaagttcatattttaatcgtggtgtggtagaaggtatcttaacaaaaaaccacaatgcgagattaagcggatatatttttgtcgatttttcagtaagttttttacgtctattccttgaaaaagactggattgactatcttgcaagtactgacatggggattgttttagtcagcgaccgcaatatgcaatcgttagctaattactggcgaaaacacaactcagcaatatctgctgtcatatataatgatgatggtcttgatgttgccaatgaaaagatcagacaactatttattggtcgttatttatcatttaccagaggtaacacattaactcagatggaattcaccataatggggtatatggtttctggttataatccatatcagattgctgaagttctggatatggatatccgtagcatctacgcgtacaagcaacgaatcgaaaagagaatgggtggtaaaataaacgaattatttattcgttcacattcggtccaacattgatactcaacgaccagccagaatcatactctgtttatacgggcatttattgaaatgtccgtattttataaataggccgtcccctcaagagtaaacaccatagtatttaaaaccatcacacgaaaaattcagaagcattacgaaatatgaatttacaaacaatagtggcataaatgttaaccatgttaatttacgtaaagttttacgttgcaacattaaagcctcatttcaatcatcatgataaatataaaattaatatatatttatgccgtaaataccaatatacttagcaaactatgtgatctccatttcgattgatttagtgtttattgacgtatgtactggattattaacgataatatcgagttctggcctgagcaccgaaaattaatatcggtacataacgccgatcttaacgtcgttctgacaacgccagccagtcgatgtttatcacttctacttgaagcttttcctgatgtggttgcacaacaagattttttcaccagagtctgggaagaagaaggtatgcgtgtgcctactaacacgttatatcagaacatatccattatcagacgcggatttcgcgctgttggtgatactacccactcgctaattgcaaccgtgccgagaagaggattcaagatccataatgacattaacatacaaaatcatgtaataaactcgtcaacagacgcacatacacacaatgccccacctgccataaaagttaatgcgggatacaaagagagcattggtggcgcaaagaatttcaataacaaaatcctcaaacatataaaaagtcatctaattatgttgagcgcatttgtcataggcgcatattctgcatattggctatggaataataatcaaccgaagccatttttcaaggattacaagactgttgcggaaattaatggctgccattttaatgtaacagaagatacaattgatgggttgaaagagttcgataaatataaaacacggatactggattcggggattaactgtaaaaaacatccgtggttatacttccctcttgcaaaatcctcaccggggatgattgttatggcatgcaataaaaactataaccaacatgaagtggcagactgtttaaccctgtcttaccgtgaggttaatcgtgattgattataaaaaaaacttattatttattttagtttttatcagtgggtttattctcttcactgtctattcttacactgcagaaaaaatgatatataacgaaacatgcactgcaaattgggtaatttttaatgaccagggacgagcaaatcttaccatcgactttatgtataacaaaaaaaaataaaacaggaactgttgcgttgagtggaacctggcaacaaggtaacagagaaagtaaatcaatacggcgaaatattgaatacacatggattgaaaactatgacacagcccatttaacatcaaagaaagttaataagtttgagattatggatcaagttgatgatgatagacttgcacaacttattcctgatttttatgtctttccagaaaaaagtgtaagctataatatactaaagcaaggtaagcatgcttttattttgagcattggtaacagagcaataatgcattgtgcaaggtaaactaaaatagataacaaaaagatggaacctcgttaatcataaaacaataaaattaaatattctcgcagtatatggcagtctaaagcatcaaagatttgatcaacatctttcattttagacatctccttgcaatgtaaaatatcatgtatcaacaacatctggtgcaaatccatgagtcgaactcgacattcatcttagctcgattattattccttcgtacagtcgatgtaaacaatacagaaagaggattattaagaaccagtttactcagtgaatcaatagaggaaaggactaacgtttctttaaaagaattgatttcatcatctgttaaactaaactcatcattgacagatcgtgagatataactgtttttaactttactctttacgttgactttattgacagaattaacattcacatatcttgaatttaatgtccatgatgttgtttgcgtgagaacattctcagcattaaggaatttttttaacggaatccttggtttctttttcgagtccgaatttacaatatcatgcatatagaccatttcatgaatctgcgaaaattcaatgtccattgtatacctcacatttttaccgtgactcgatgttactgttcaataatcaccttccatcaatactaaaattaatacccctaatgtgccgataacaaatatagtcattctacgtaacgtctccataaggtgatatttgacattatcagaagctgcgaattcggattttgctctaatcaaatgagagaaatgtaaaatgaagccacgaaatattaataatagcctaccactgcaaccattagttcctgatcaggagaacaaaaataagaaaaatgaagagaaatccgttaatccagttaaaatcacaatggggtctggtttaaattatattgaacaagaatctcttggaggaaaatatctaacacatgatttgtcaataaagatagcggatatttctgaagagataattcagcaagcaatattatctgctatgagcatatataaattttcgataacagatgatttaatgagtatggctgtaaatgaactcataaaactgaccaaaatagagaataatgtagacctgaataaattcactactatatgcacagacgttctatccccccgcgtcaccagacataataaagaaaaaaacaaacgacattctacccttctcaaaaatcccctttttaattttcattgaaaaaatggcaattgatactatgaatccaggtcatacacattaaggcatttatgtaatgtcgtaattaagataactaataaggtgaatattagtaaaacaactaatgatgttattagtttgtagtgaacagtacttttaccaataatgaaaaatataccataagcaatgcaagcttaaaactcataatttaaaaaagataaatataaaaatatcaatgagtcaatcaataataatttggcatcacgagacacatcacagaggaatattatgagcacagaaacaattgaaatattcaataatagtgatgaatgggcaaatcaactaaaacacgcattatcgaaaggagaaaatctggcattactacatggtttaactcctgatatccttgatagaatatatgcatatgcattcgactaccatgaaaagggtaatataacggacgcagaaatttattataaattcttgtgcatttatgcgttcgaaaatcatgagtatctaaaagattttgcatcagtatgtcagcccaaaaagaaatatcaacaagcatatgacctttacaaactaagttacaattacttcccgtatgatgactattcagttatttatcgtatgggtcaatatcagattggggctaaaaatatcgataacgcaatgcaatgtttctatcacattattaacaattgtgaggatgatagtgttaagagtaaagcgcaggcatatattgaactcttaaacgataattcagaagataatggctaagcattacaatcatttggttaaatttgctggttatagtgcagttaaccactataaccagcacctcttatgttttcttaaatcagcatcttaaaacagttaagagcatactataaatcattatttttcaatgcgttagagaacaatctactttatcaaaattgaataaggctatttcagattacatcactgaattcctaagataaattagtgaacacaaccatagatatgtcgaatgtaatttcctgtagcgttaatgacacataaatatgaatagccataatttctattgcttaagcaggatgcaagaaaccaattttttcatagaggttaactaatggacttagaaaataaattctcatatcatttgcttgagggattaacgctcacggaagatggaattcttactcaaggaaatgagcaagtttatattccacagaaagagttaggtgtattaatagtattacttgaatccgctggtcatgttgtactgaaagatatgatcatcgaatcagtatggaaaaatattattgttagtgacgagtccctgacaagatgtatctattctttgcgctgcatttttgaaaaaattggctatgatcgttgcatagaaacaatctaccggaaaggttatcgtttcagcgggcaggttttcaaaactaaaattaatgaagataatacttcagactattccatagctatattccctttcactacttcattgaatacactggatccattaatacttaatcaggaattagtgcaaatcatttcaaataaaaaaatcgatggtctctatacctatccgatggctgcgacaaatttttgtaatgatcacatatctcaaaattcattcttgagcagattcaagccagattatttcgttacaggaagaataaaccagaataatgcagtgaacactttatacattgagttgatcgacgctaaaaaccttttcctcatcgccagtaatcatctccctgttgatgaactacataatacatcacaatttattatagataatatccttcaaacggtacataaaccagaacgatctgtaagattagctaagcaggaccaaggatataagaatcattatttatcagatgaaatgttagccggaaagaaagaactttacgacttcacccctgaaagcatttacagggccatgactatatttgatagattacaaaataaaagtgatatacagacgctaaaaacagaatgttattgccttctagcggaatgccatatgtctttggcacttcatggaaaaagtgaacttgaacttgctgctcaaaaagcattagagcttttagattatgtatcagacataaccactgtcgatggaaaaattttagctattatgggactgataactggtctgtctggacaagcaaaagtatctcatatcttatttgaacaggctaagatacactcaactgatatagcctctctctactactatagggcactagtccactttcataatgaaaaaattgaagaggcaaggatttgtatagacaaatcactacaactcgaacccagaagacgaaaagcagttgtgataaaagaatgtgtagatatgtatgtgcctaacccgctcaaaaacaacattaaactctactataaagaaactgagagtgaaagccatcgagttataattgacaacattttgaaattaaagcagctgacgagaatttgtatgcgataaatttttattgacgcaattttattatttagatgtatgcaacttgttatttaaacaacagagataaaaatatctaagatattcaccttattgcaagatatttaaaatgctctagagttaaaagtatgatgtaaagaccattggcctggacaattaaaaaagggagctttatgactaatccaatcggtatcaataatttatctcaaagttcaaatatagcgaatgcaacgggtgatgaagtcgtatcattagataaacacatcaacaccagtgctactgatacagatcaaatacaagcatttatagtttcaacatggatggcgccttttcaaaatgatatgtattcagaagataatcctatctcaccttactataaaattgagtggtagacgattgaccaaataaatcataacgagatacttttataatagtatctcgttcctttcattcaatcctcacacatgaaaaaatatgcgctcaccaaaagttaaattcttaaccatcttcacgttttgtatatttattacaaaaatgtctttcgccagcaactcttgctctaatgaagcaggaacaatgttcagaatcgaaccaaatttaattaaagctatcgctcttgttgaaagcaatctaaaaaaggatagcataggcaagaacagagataagaataacaatataaagagtttagattattggttaatgcagataaaccagatgcatattcccctgttaaaaaaacgtggaataataaaagatgaacgagatttgttagataacccttgtctgaacattaaaataggaaccgagattttatataaccatttttcacgttgtggagtaacgtggcaatgcctggggacttataatgcgggttttgcaatggataaccaaaaaaagagacagcaatatgccccaaaatatatattgtatataccaggcttaatgaactagacaatcgtaaggcttcagcaaaatgagcctaaagcctcttttttttatatagtgcaaacacccatacgtaaagctgttttgatcaactcgataccactgtgaacatctaatttcttcatgatattgagtctatgagtttcgactgttttcctgcttaactgcaagaaattagcgatttctttgtttgttttaccatcagctatgagttgtaatatttctgactcacgatttgtaagttgattatcagaggaatacctggaagatattttttcacaatccatatgtacactatcaaaataagtgtaaccattactaatcgaatcaatagcacgatttagtttcgccgggtgactggttttccatacgcatcctttcgcacctgcttcaagcaattttattgaatcaatatacggcatctttgctacaaatgtaataatatgagcatctatcttatgcgatttaacccattttacgagttcggaccccatcattccacctgcaaattctcctaaaataaatatttgggctgtagatttgttacactccgctatagctttcttcagatctttatagcccccaacaacctcatataaatcaggataatgtccgagaaatccaattatcccatcaatcataaacggctgctgatctgaaactacaattttaatttttcccatatattcatcctgagtgtaaatgctttaacgtattcatttataatcatcccttccattattataagcaaaatccaaagaatacattgatgaaataataatgaaatattattaaaaataaaatttttgcgtaaaaaaataccacaggcattaaaaaataatgagatgattaaaatattacaattagattatattcaaatcattaaacctgagccagtgagctataagtcctcagggcttgccaaaacagaattattcatatccaaagaatgtgtttcaaacattttttcaactaaataatgtctggcttgttcgcagatttcgttaaccttgtcaggggagaaacaatgattattaattaaatattgctcacaattatccacaaattcctgcggactaaattcagcaataaattgatcggtaaaaaacacaaaacgcttatcatcatgaaatgtaatatggacattccatattgatttgtcgacaaaatatgactctacttcaagatacttatctttgaaactggtaggtatatagagatttacaggacctgatattgccggtaatttttttctccaactttcaaaaattttgataaaaacatcaacttcctctgaggattttaacaatatactcttcagatcgtttatcatgtttattcttttttttctagttctgagctcaacaagcttatcaagggtataaaattatccatcacatcaataatgccttttgtatagccatcataataaccttgaataaatttttcttctctctttacctcaatgctctgaatttttgcgttggtttcaataaggatattttctttaagagaaactatttctttcaatccatcagaaattttttttaatcacaacaccatttgcaggagattttatcaagctcatctctattttttttcgcataaaatgtatttctctctaaaagagttgatgcaagtggtaacggcaattgtatgtgatcaacaaaatcaggaaataataaattaaatcgttgctgcattgccaatggttgttgccttatatagggtaacaacgttgaaaaaccacatgtgatgatattgtgatagttagcgatgccgggtttgtatcgtgccttttcatttatttccaccggtatagctgataaataatcccttagcacagcaggaaccttataaaaaaatccgcgttctgcaaacctttctcgataaaagtgataaccactgaataaacagatcaatggaaataaattccaattgtttatgtattaaataagtgaactattcagattaaaatgttcaactgaaagattgtactgcagaacaatcatttcattggtaatagatctcagcaccggattgttaataggtgtattattcaagcttactcgttgaggatgaatacaactaattggatcatatataatctttcttagggcaagattcataacgctctcatatgtctacttaattttcaacctgactaaattagttagaatggccctatacttccataacagccagcaagtcgctacggatattaatgcaagtaagatagaaaccggcatagccttatcataagcaaaaacaagttcgctaatttcatatgttggtgcttgctcaataatgtctcttcgttttgacaatacaacagaaatattttcatattgtacgcttgcaaaactattaacaataaatctcttgatgtcatttatttttatttctgggttgatatctttttcatatactgcaagtacagaaatatgaattggtaaagcagttttaccactatcgccattatcaacatcgtaactaacatgtactctcgaagaaataatgccatccataattttgagagattgctctaaccactgctcaatagcagaatatagccttgctttttccgctcgtggagatgaaacgagtgcatctgcagggaacatctgcgatatttgaatatcaggcttacccgggagattgtagatttttagccaatccaccgcagaagcaaaatccgttggttcaacatagattgagaatccagttttgccttgatccttcttttcagcattaatattatgtctttgtaaaacagcaaggacatcattagcttgctgttgatcaagatggttcaataattcctgctgcttgcagccgcacaacagcaggataaacaataataatgatatatatttcatgagcgggtcaacgtctcaactgcagcgacaatctttcttgctaatgttcccaccaatgaaacctcgacattataattaagcacatgatcctgcaagactaataatttttcaggagttaacccctttttatcagaccttaatgcttgtaacgcattttgctgccaattttcagtttgtacagcatagttggcaaaagcggagatcattttatcatccgggttgtcaagattgagaacccggtcatttaaatcaatcactttcgcttgctgtatttcatgagcagttgattgctcagctctatcaataggtggcatattgcttactgacataataaaatccttatccagtttagcggaagttttgtatgattgctgaatcaagatctttatacgcttttacaacgttagattgcgcatttcgatataatgtatactcagctaatgcactttgatattcggcaagaaatttcgggtcggagggattggttgctaaaacctccaacgctttttcaacttgctggttcagatcatcaacgccctgatcaaattgtttgctgatatccataatataaccattccaatctgccataagtcttcctcaattattcctgaaacgtccagttgctaccttgagacttctcgaatcggttatctccgtagctaaatgaactattatttgtgtcctgatttttcaaattcacattaaatcttacatattgtttaccccattgtttataatattcgtcaacatagttattaattttatttaattcactgtcacttaacgtaccaatgatattgaaatacacattgttagctgttttatatttttcataagaaagacctatcgctgacaatgtttcaatagcctgactttccaatacattatcatctaataccgcaatacttatattgctggcatatggcatagtttgtagtaaccctttaataagattgtcgattagttgctgtgtgatagcattccgttgcttactcacggtcagtctgggattactggcatctaatagctgaagtttaaaatattgtaaatcagggaaattatcagcaagccatgaaaaaattcgtatcgattcatcatcaggatttatcacccgtactggctttccaggttgatttttttccagtgcttgtttgacccagactgcttcatccaaactattggtattgatatagataacatgatctctaccatataaaatctcataattcctgtttttgtttacaagaattttatcgatatgtctcagctgcggatcattactggcattaacaatataaaaagcaaagaaaatgatagcaaaaagaaaaaaaagcattacatacttaaacagcttactgctaaagaaatgttgttttgtagaaataatgttattttcaataatgcctggcaatgaatactgccaaacttcattttttcttttacagcaaatttgagacctaaaacttctacttgctgattgaatgttaacgttctatcttcaggttcttgtgctgttaattctctgattgttactactatatcagggtcggtagtaattattatctcaaaactacctgtaagctcgccataaggaacgactattgtgttttctggtaactcagaaaaagcatcacttcttcctaacgaaacatcattaccaatgataacaagtagacgcccattaagtatttcatactcgcatccattcaatggtccgctcaacaaacgaatggcataagattccaataagtcttgtgataagaatttatcattattttccatgaataccccccgctaattccataagctctagtttagagtagtgtaacaagacggaaatttcatgaccaaaatatgatgatacagaataaaaaattataatttcgaggactattttaaatgcctctatgcataactttatttacaatttaaggtataaaccctattccctcaatgttaagcaaatataacaattactcttattttaacttttacacgtaatatttaccctaaatgattttagagtacaggttggcatatgcaagtcttttccagtgatgtctacttcactgtaggcactaatgcattattagcatcccaaaaagaatattacagcgatttagttgcgttggttgatcttgggcattcgttcgttgttattgatgagtatcaacatcgaaatctcaaaccaaatacagaacctgtaaacatccttttaagcaacaatttcatcaggatcaataagaatattagattatctgatttaacgcatttcctgatttcgaatcttcatacacaaaatgtgtatcccacacaagaaccacttacccatgatgatatagatatcctgcggttatgtgtttcttactcgttaaaacaaatagccattattaaaggaattgattataaaacagtatcatatcacaaaataagagccctaaataaacttaacataaaaggtactgttgagttgtttatagcactctgtgaatgggataaacattattttaaactccaatcttgcgtaagagaaagttgatatgtcattagtaggatataatagtaaaatcataataaccatcgcgctgatatcgttgctctctgcatgcaccagagaaaattcattaaaggagaatcaaaataaaagaagtggcgaatcccaagcgatagtagatgcaagacagttctttagcgaacacccggaatatatatcttcagcagaactggagcaaaagctatatcgcgaatttgcacaggttactacagttccagcttataaagagatgagtatgtatcaattgcttgtcatttcataagatcgtttaactcattaaataatgaatctacacggtttttgcgtgtagattcttataaatttctgactacgacagatgtttaattttttaaattatcgtctttattctcgatttctttctcttcaccttcaatgaatttatcttctgaagagagctgttcatctggaacaggttgtccagcattctccacatcttcaagccacagcagaagacgtaatatttcatctatattttcgaagctaacataatcgtagcgacgatgggtagcataaatttttcgtgctaattttttatctgtgataattggtattccgatttcctttgcatatttccttacggctaaggctacctcattagtttctcttacagaaatcaatggaataggtgaaagatgtggcttaaagtatatccctattgcaatgtgagtagggttggcaatcatcaaacgactattactgacatcagacttcaattgctcagaaagaatttcctgatgcgctctctgcgtttagacttaatttctggatttccttcttgctccttgtattctcttttaacttcttgtttatccattttcatatctttcataaataaaaaatattcagcgataaaatcaaaaattaagacaattatcatactgccgagacaatacagtataagaaggaatagcatctctccccaatctgataataaagatatgatatctccatcaagagttttaaaaagcagtgatttatgattactccaaaatactttgttcgccaatgcaaaaaaaataatataaagaattgctttaacaaattcttttacggtttttaagccaaatatacgctttaagccatttactggattcaatgaatcaaacttaaatttaacagcttcagttgctaattgcattttactttgaaaccaggagacaagtattgttgtgaacatgcaaaccagcaaaaaaggaatgatcgttttcaaccaaccaacccccatagctttaaaatagtcccaaatatctggtttagcgttatgatcaaggatgtattcaagaatcgacataatgtgatgcacatcaaaaacatatccgagatataaagtacccacaagcattattacagagatggttaagtctctactttttagaatttgcccttttttagaagcatcctggagtttctttgtgttggcttttcagttttattggccatgaaacactctatttctcaatgtatagttgcaattgttctgggaaaaaggataacggcattactcgttcagccagtattgggccaaaataaataattaatattaaaaatgccagcgcacttttgacagtcagtgaaatggcaaaagcatttagttgtgaagcataacgtgccagcaatcccaggacagcctcaccgcccagcataacggcaatcacgggacttgcgtaaacgatagtatgagtcattatgttattaatatatgagaataaaggctctaatttaggaaaattaaaattgcctgaaggccataaattataactttgccaaagagtttccagaataaagttcaatccaccgttagtaagataaaccgctgcagagaataggttaaataatcttgctaattccgaagtatcgacacctgtagcaggatccaaagtactacttaacgttgcaccacgttggttatcgataaaactacctatagcaaggaaaatccaaaacggggatgataataagcaagcaatgaacagccctatgataatttctctggcagcaaacaaagcgatatcgatttcatttaaggtcgataattcatagtggtaatgctgaactaatgcacatgataccactattattattggatgacggactactgttggtatattcccactggcgaaaaatggtaacaaatagaaagttggtgccaatcggcaaaaaccgagcgctgtagcagccagcagactatgcaactgatagagtatcgcctcccccatcctatcctctcgcgaatgctaaattcagcatttcgataccaaacgaatataatttttcaccataccatccgctcattaaaaaaaagcaaatacttacgcataataatttgacgccaaatggcaacgtctgttcttgtaactgtgttaccgtttgaaaaagccctaccaataaaccaacaaatgtcgcaactgcaataggtcctgcagacataactaaaatcagatacagcgccctattccccgcaaaaacaatatcgtccatatttttttctcagggattaatggataggtcaaaatattgtaaaatgagtccttttgataacattgtccaaccgtccatcgcgacaaacaaaattaattttatcggtgtagatatggttaccggactcatcatcatcatacctaacgttaacagaacgctggatataaccagatccactacaacaaagggtaaatagatataaaaacctataataaatgcactttttatctcactcaacgcatatgccgggagtaacgagaaaattgaaatattatcatcatcgaatatctcttcattgtcttcagagctattcaccttctgaatcttttcaaaaaagttaaccaactccggttcggaatattttatcaaatatgatttataaccactcatgcctgtctcaacaaaattaacaaccgacgctacattattgaatgaaagattctcattctgactgttataatatatttccttcccaaccggcatcattacaaacattgacaatagcaaagcaaccccattaagtgtcatatttgatggcacttgctgaagccccagcgcgtttcggacaataacaaaaacaatcgagaatttaataaaatatgtcccggatgctattataaacggcaatagtgtaaataatgatagtatagctatcagcgaaatgctatttgacattattatgccctgataaccaagaatgaatctctacgcccaatttatcatccacttcaacaagttctccatagccagttagcgcgccatttacacgtatttctatatttttctcagattcagaaagcagagatattattctttttgcacagagttcgtctatttcatatagattcattattttcttaccaagaacaaactcaatttttacaggcaagtcttcaaaactattaatcatctgatcgtcattttcatcataaatctcactctcgttttttttgatatcaaaatcatctgtttcaaaatcttcctcgtactcaaaatgtgatcagccatttttaactcctctggataaattaaatcaaaaatttttgtattataaataaccgcataagccaaattatttgagattaataaaacatcaccaacttcaatatcaacaagacttctgtaacatgttttactaaatccaattacaaaatgaatggagcaatataacgattttttgtctaacgctggagcgtttccgtattggcagactgtgactttatctaaccaaagattcaattcccctgtccatattcttattagtggttgagcagggctcaatactccatcaaatactttacctacgcgcaaacgattatattttagttcaggatgctttagatttaacggggaactggataaactgagccattcccctattaacctttccgtttctggcattaaagccatcccagcgagctcagatgaaattaagggaaatatttctccaagcaatacccatccagaccagctgccactctcttctgctatcggtagccatttagcactaaattcgggcattaataatgcaacatcttcgccattttctttccaattttgaaaagtggtttcaaacgtatgagtgtttcgatttactttcctcagaccgaacattaactttcatccttctgatcgttttcgaatttgctttcattttcttgctcctcataaggctgatgtcgttgtccttgtcgttcatcttgctcagtcaatacccaacgttgtgctgtaactcattatgaaaactatttaattccctcatcattgataaggttggacatctctttcaacatgagagtcattgaagctttcgaccaatttagcggaatgatagggcttggcgcttcatgcaaagttcccgacttgtggatatagttatagctttcgggaagtgccatttctggtacgctcctgccatttgcaccaatcatattctcgcctgttatttgggccaatgatctattcataaattgcactgagtcattcaaatactcttcttttcttgattctttataaacaattgctgctgattttgcataccatgagtcaaaaaaccattctgcttctgttgatggaatgaagctcttttctctttttgcatgcgaattttgatcggtatcggttttaatatcattgaaccaaaaatttgccgactgataattatccttctcgtatctttttataccatacggacctgctagttttttaactatttttagaacttgctcttttcttctggtgtttatctttgaaagatttgcaggataaataacattaagtaaagccgcatcggcttctctgtaatgtttatctttttccagataacctggggattctccccctaaatcaagctgtaacgttattctttcataacctttatctatgaggtggttcaacctcgttgttgaaagaggttcatccagttcattggctttagcttcgcgtagtaaatcagagacaaaaacagagtctttctttgagagtaaggtcgacaaacgttccagtccagaggtcaccagtgcaacggaagatgtgtttaatcgggcatcttcttcccatgctccggaatcttccataacatagaaattggctttatccagataagcaatcagcagcgcaaccgattttaatcggtcacctttttgccaatcttcagcgttaattgtaccagtgtcgattgcttgtataaggagatcaagataaagacctaacgcatcattttgtttatggttccacagctgcggcttgccttcttcctgcacatctgccatcacgggggagttgctgtcaaatcggatatgcacagcattcatttgcccgggaactccatccagtcgtttggggttgctaatgacgtcctgcatccgcttaatctggtcgggcgtagacatataatcccacagggtgagcagaaccttttttgcggctacactatttccctgatctgatactaatgccatatagccccataaactatccctcagccagacagcatcatagtgggtttctgccgctgttttgtcatcttcgaaagtagaagcaagaataaatgttccccagggtttctccgtcaacgttaactttcgtgtgttttctgttaatgttaacaacccttgaatttcgtctttggtatagtggctctttatttcattttttaatttggctgagtgaatcagaagacgataattagggtacttatctggatttaacgataaataacttttatctgttgctgcccccgtggaattaagaatgttaaatacagattcactcgtcacttctgcccctgtcgcctggcatgtgccgcacgaaaatataccagcgagcagaagagttaatgcagatttccctttcataaaatattccatcaatcgtttgttaaaagcgtagataaccacttatttaacaacttgaaaataaggtgttttacctgggttgttacaaaaggattgcattgcgtaaacgctttttatttacaacaaaatggggaaatattacggcgattgcgaaaagtctgaagcgattgaattaagataatatagaaaatcagatacagcaaaaatggcagattgatgaggcgaagataaattggagcgggcgaagggaatcgaaccctcgtatagagcttgggaagctctcgttctaccattgaactacgcccgcttcgagatgcgtaaggcattataaaccttacgctctccttagcaagtgccgcgctgctgactgctgattaattcgccatcagcattttggcttgctgccctgcggcggcaagtaacgtagcggatcaattgccgttgcacggtaacgaatctggaaatgcaggcgaacagatgccgcatccgtgctccccatagtggcgattttttgcccagccttcacgctttgcccattatttaccagcatcgtgtcattatgggcgtaagccgtaatgtaatcttcactgtgtttaatcatgatgagattaccgtagccacgcagctggttgcccacatacaccacctttcctgcacccgcggcgtaaataggtgtaccccgtggagctgagatatcaatccctttattgccgccatctgctgtcgaatacggcatgataactttccctgtcgttggccataaccaacaacgttgccctactggcggccaggatgatttcggtaccgctgatgacggtgtaaccgatgcggttttggtcgttgatttggcggttgatttacgtgtactactgctacttttcgccccacccagttttagtttctgaccaacttcaatggtgtaagggggggaaatgccgttcagtcgcgccagttcttttacgctggttcccgtggtgcgcgaaatacgatatagcgtatccccccgtttcacggtgtaaacggagccggaatacgttcctgtatcggatgatttgctacccgaacagcccgccaaaagcagtccaaccgataacaacatcacgatacccagagattttttattcaggcgtcccgcactcaaaatctttcctcgcttaaaaaacaagacgccttatcatagcagccagcctcttgatacccaatctcttgcttctggaaaaacgtggtaatagagaaagaggttaatttcatttggcaaagggaagtatcatcagcaaaatattcgctgtagaggtatcgaacttcctgactttttaccctagttcccatcctgatgcgtaataatcccaatttatcacattgattttatcgccactcatattgatacgtatcactgcccctattcagagtcctgtttcgtatcatatctgtgtttttttaacgtcatcacacttcctacctcccctaacgcttatcgtcgtttctggcgtaaatcttgcctgcttagactaaatctttgccataagaaccaaatgttcaaatcgaggggatttctatggaagcgcgggaagcaaccgctacgggtgaatcatgcatgcgcgtcgatgccattgctaaggtcaccgggcgggcacgatatactgacgattatgttatggcgggcatgtgttatgcgaaatatgtacgtagccctatcgcacatggttatgccgtaagtattaatgatgaacaagccagaagtttgccgggcgtactggcgatttttacctgggaagatgtgcctgatattccattcgctacagctgggcatgcctggacacttgacgaaaacaagcgcgataccgccgatcgcgcactgctaactcgccatgttcgtcatcatggtgacgccgttgccatcgtcgtggcccgcgatgaactcacggcagaaaaagcggcgcaattggtcagcattgagtggcaagaattacccgttatcaccacgccagaagcggcgctggcagaagacgctgcaccaatccataacggtggcaatttactgaaacaaagcacgatgtcgacgggtaatgtccaacaaacaatcgatgccgccgactaccaggtacaggggcactatcagacccccgttattcaacattgtcacatggaaagcgtaacatcgctggcgtggatggaggatgactcgcaaattaccatcgtttccagcacccagatcccgcacattgttcgccgcgtggttggtcaggcgctggatattccctggtcatgcgtacgagtcatcaaaccatttgtcggtggcggttttggtaataaacaggatgtactggaagagccaatggcggcattcctgaccagcaagcttggcggcattccggtgaaagtttcccttagccgtgaagagtgtttcctcgcaacccgtacccgccacgcttttaccattgacgggcaaatgggcgtgaaccgcgacggaacattgaaaggttatagtctggatgttctgtctaacaccggcgcttatgcatctcacgggcactccatcgcttctgcgggggggaataaagtcgcttacctttatcctcgttgtgcctacgcttacagttcaaagacctgctataccaacctcccctcggctggtgcgatgcgtggttatggcgcgccacaagtcgtatttgccgttgagtctatgcttgatgacgccgcgacagcgttaggtattgatcctgttgaaattcgtttacgcaacgccgcccgcgaaggagatgctaatccgctcacgggcaaacgtatttacagcgcagggttgccggagtgtcttgaaaaaggccggaaaatctttgaatgggaaaaacgccgtgcagaatgccagaaccagcaaggcaatttgcgccgcggcgttggcgtcgcctgttttagctacacctctaacacctggcctgtcggcgtagaaatagcaggcgcgcgccttctgatgaatcaggatggaaccatcaacgtgcaaagcggcgcgacggaaatcggtcagggtgccgacaccgtcttctcgcaaatggtggcagaaaccgtgggggttccggtcagcgacgttcgcgttatttcaactcaagataccgacgttacgccgttcgatcccggcgcatttgcctcacgccagagctatgttgccgcgcctgcgctgcgcagtgcggcactattattaaaagagaaaatcatcgctcacgccgcagtcatgctacatcagtcagcgatgaatctgaccctgataaaaggccatatcgtgctggttgaacgaccggaagagccgttaatgtcgttaaaagatttggcgatggacgctttctaccaccctgaacgcggcgggcagctctctgctgaaagctccatcaaaaccaccactaacccaccggcgtttggctgtacctttgttgatctgacggtcgatattgcgctgtgcaaagtcaccatcaaccgcatcctcaacgttcatgattcagggcatattcttaatccactgctggcagaaggtcaggtacacggcggaatgggaatgggcattggctgggcgctatttgaagagatgatcatcgatgctaaaagcggcgtggtccgtaaccccaatctgctggattacaaaatgccgaccatgccggatctgccacaactggaaagcgcgttcgtcgaaatcaatgagccgcaatccgcatacggacataagtcactgggtgagccaccaataattcctgttgccgctgctattcgtaacgcggtgaagatggctaccggtgttgcaatcaatacactgccgctgacgccaaaacggttatatgaagagttccatctggcaggattgatttgaggataacatcatgtttgattttgcttcttaccatcgcgcagcaacccttgccgatgccatcaacctgctggctgacaacccgcaggccaaactgctcgccggtggcactgacgtactgattcagctccaccatcacaatgaccgttatcgccatattgttgatattcataatctggcggagctgcggggaattacgctggcggaagatggctcgctacgtatcggctctgcaacgacatttacccagctaatagaagatcctataactcaacgtcatctcccggcgttatgtgctgcggccacgtccattgctggaccgcagatccgtaacgtcgctacctacggtggaaatatttgcaacggtgccaccagcgcagattctgccacgccaacgctaatttatgacgcgaaactggagatccactccccgcgcggtgttcgtttcgtcccgattaatggctttcacaccgggccgggcaaagtgtctcttgagcatgacgaaatcctcgtcgcctttcattttccgccacagccgaaagaacacgcgggcagcgcgcattttaaatatgccatgcgcgacgcaatggatatttcaacgattggctgcgccgcacattgccgactggataacggcaatttcagcgaattacgcctggcatttggtgttgccgcgccaacgccgattcgctgccaacatgccgaacagactgcacaaaatgcgccattaaacctgcaaacgctggaagctatcagcgaatctgtcctgcaagatgtcgccccgcgttcttcatggcgggccagtaaagagtttcgtctgcatctcatccagacgatgaccaaaaaagtgattagcgaagccgtcgccgcggcggggggaaaattgcaatgaatcacagcgaaacaattaccatcgaatgcaccattaacgggatgccttttcagcttcacgccgcaccaggcacgccgctctcggaattactccgcgaacaaggactgctaagtgtcaaacaagggtgctgcgtgggtgaatgtggtgcctgtacggtgttggtcgacggcacagcaatagacagttgcttataccttgccgcctgggctgaaggaaaagagatccgcacgctggaaggtgaagcgaaaggcggaaaactttctcatgttcagcaggcttatgcgaaatccggcgcagtgcagtgcgggttttgtacgcctggcctgattatggctaccacggcaatgctggcgaaaccacgcgagaagccattaaccattacggaaattcgtcgcggactggcgggaaatctttgtcgctgcacggggtatcagatgattgtaaatacagttctggattgcgagaaaacgaagtaaaaggatatccggcctgaattcaggccggattcactgaggttatgtgtttaacaactcatatttcttaatcttgcgatagagcgtagcaatgccgatgcccagttcatcagcaacttgcttcttgctgttatgacgtgaaagcgcctcgcggatcatttgcttttccatctcctccagcgccgtgccgcccgcatcatcgagtgacaggtgcgcctcactgacctctgttacatcactttgctccgttgtgccattattcagcagatttggcggcaatagcgtgctgtcgataacttcacctgaaggaaccacgttaaccagatattccatcaaattgcttaactcgcgcaggtttccgggccaacgatgcttacgcaatatttcgacgacatcgggagcaatgccaggataaaccgatcccagacgacgggtatgcagatgtaaaaagtaatgcaccaatagttcaatatcttcctgacgttcacgcagcggtggcagagttatcgggataacattaagtcggtagaagagatcttcgcggaatttaccttcggcaatgaactgggccaaattctgattagttgcagaaatgatgcgaatgtcgacttgtattgggctactggcaccaatcggcagaatttcacgtgcctcaatagcgcgcagtaatttagcctgcaacattaatggcatatcacctatttcatcgagaaacagcgtgcccgtattcgccgcctgaatcaaccctgttttaccgttggcagaagcgccagtaaatgcacctttaacataaccgaacagttcgctctccagaagctgctccggaatcgcggcacagttgatagcaataaagggtttattccgtcttccgctcaacttatggattgcacgggcgacgacttctttacccgtgccgctttcaccaaccaccataacgctggatgggctgggtgcaatacggctaatgagtcgttttaattgccgcataacacggcactcgccaaccaattgttcaatatgcggttcatcaggtgcatttgctacagaaaaactggtatgcgattggtgaaacgccattaaaaataattgtcggccctgaatgttatgcaattgaccaatgattaattcacttttatcgtcccatgaaacaatatgctgcatatgtccatgggtaaaattactctcaaatgttaatggtctgaaacggataggtttcccaataatattattttgcacaacaccaagtgtttttaaggcagtctgattaacaaactgaacccgattttcatcatctacaactaatacgccctgatccatattatcgatcatggtcgcaaatattttactgatgttatctcctggcccctgatcctccagaagtttcgaaacaaaaatggtggatatatggcgaacgtaatcagaaaattcgcgtaaattatcactgatatgctcttgttgctcgtgggtaacggcaatcaaacttatcaccccaacacaacgatcctgtaaaatgacaggcgtacccagaaatgctttttcgcggcaattttctttactatcgcaaccttcgcaaaggggatcgaagcgagactgtgtcacaactttttcagttttcgtttccaggacgtggcggagcaggcgtgagttgccgctcaactggcgaccaagaaacttcccatacgcgcccgttccggcgacgcgacacaagttttcatcaacgatctcaacctcaagctgcaaaacgctggcaagcattctggcaaaacgctgaattgtcggttgaatttgcatcaatactgactgcgtagtagcaagctccatagctttaccttccagacttacttaaaagtcgatcattgaagacgttgatggttcacagatcatgatgatattaactcaggcgaaattggctttgataaaaatataagatttttatcattttctaatgaaattatggaagagatatcacatttctatatcaatatgagaattacggcggtgagtttatcaaactgaagagagatagcctgcccctttatcttatttctgatacttagcagcaaataaataacgcgataaaaaaagccaaacgttttcgtattttacaaacaaccagaagctggcatcaatttgtgatcaaccccacacattatccgtcaaattagtcttttgcagccgcgcggataattctggcacacttattgttagtcccaggtatagctgtgaaaacaccaatcactttggcaagtcacagtgaaataaaccactttgcctgtcattccactaccgggactttatgatgaaaactgttaatgagctgattaaggatatcaattcgctgacctctcaccttcacgagaaagattttttgttaacgtgggaacagacgccagatgaactgaaacaagtactggacgttgccgcagcattaaaagcactgcgtgctgaaaacatctcaaccaaagtctttaatagtggattaggtatttccgtattccgcgacaactccacccgtacccgcttctcttatgcttccgcgcttaacctgctcggccttgcacaacaagatctcgacgaaggcaaatcacaaatcgctcacggcgaaaccgtgcgtgaaaccgccaatatgatctccttctgcgccgacgctattggtattcgcgacgatatgtatctgggcgcaggcaacgcctatatgcgtgaagttggcgctgcacttgatgacggttacaagcagggtgtactgccacagcgtccggctttagtgaacctgcaatgcgatattgaccacccgactcagtcaatggctgacctcgcgtggttacgtgaacactttggttcactggaaaacctgaaaggtaaaaaaatcgccatgacctgggcctactctccaagctatggcaaaccgctctctgtaccacaaggcatcatcggtctgatgactcgcttcggtatggatgtcaccctggcccatccggaaggctacgacctgatcccggatgtggttgaagtggcgaaaaacaatgctaaagcctccggtggtagcttccgtcaggtcaccagcatggaagaagccttcaaagacgcagacatcgtttatccgaagtcatgggcaccttacaaagtgatggaagagcgtactgaattgctgcgtgcgaacgatcacgaaggcttaaaagcactggaaaaacagtgtctggcacagaacgcgcaacacaaagactggcattgtactgaagagatgatggaactgacccgtgatggcgaagccctgtacatgcactgcctgccagctgatatcagcggcgtatcctgtaaagaaggtgaagtgactgaaggcgtattcgaaaaataccgtatcgctacctacaaagaagccagctggaagccttatatcatcgccgcgatgatcctgtcccgtaaatacgccaaaccaggtgcactgctcgagcaactgctgaaagaagcgcaagaacgcgtgaaataacccctcgggcggatcagctggtcggccctctatttccagaggccaaaaggataggatatgtccgttttctcattgaagattgatatcgccgataacaaatttttcaacggcgaaacatcaccgctcttttcgcaaagccaggccaaactggcgcgccagttccaccagaaaatagctggttatcgcccaacaccgctttgtgcgctggacgatctcgcaaacctttttggtgtgaagaaaattctcgtcaaagacgaatcaaaacgattcggtctgaacgccttcaaaatgcttggcggtgcgtacgccatcgctcaattattgtgtgaaaaatatcatcttgatatcgaaacgctgtcatttgagcacctgaaaaatgccatcagcgaaaaaatgactttcgcgaccaccaccgacggcaaccacgggcgcggtgtggcgtgggcagcacagcaactcggacagaatgcggtgatttacatgccgaaaggttctgctcaggaacgcgttgacgccattctgaacctcggtgccgagtgcatcgtcacggatatgaactatgacgataccgttcgcctgaccatgcaacacgcgcagcagcacggctgggaagtggtacaggacacggcatgggaaggttacaccaaaatcccaacctggatcatgcaaggctacgcaaccctggcagatgaagccgtcgagcaaatgcgtgaaatgggcgtaaccccgacgcacgttctgctgcaagccggtgtcggagcaatggccggtggtgtgctgggttatctggtcgacgtctatagcccgcaaaatctgcacagcattattgttgaacctgacaaagctgactgtatttatcgctccggcgtcaaaggcgacatcgtcaacgttggcggtgatatggccaccatcatggcaggcctggcctgtggcgaacctaacccgctgggctgggaaatcctacgtaactgcgccacccaattcatctcctgccaggacagcgttgccgcattaggtatgcgcgtgctgggtaatccgtacggcaacgacccgcgcatcatctccggtgaatccggcgctgtcggtttgggcgttctcgcagcggttcattatcacccgcaacgtcaaagcctgatggaaaaactggcgctgaacaaagatgccgtggtgctggttatcagcactgaaggcgacaccgacgtgaagcactaccgcgaagttgtctgggaaggcaaacacgctgtagcaccttaatcaccctattggaactgctccctgcaaaacggggagtaaaaaatctggagaaaaataatggctaagaatattccattcaaactgattcttgaaaaagcaaaagattaccaggcggatatgactcgcttcctgcgcgacatggttgctattcccagtgaaagctgcgacgagaaacgcgtagtacatcgtattaaagaagagatggaaaaagtcggcttcgataaagttgaaatcgacccgatgggcaacgttctcggttatatcggccacggcccgcgtctggtggcaatggacgctcatatcgataccgtcggcattggcaacatcaaaaactgggacttcgatccgtacgaaggcatggaaactgatgaactgattggtggtcgcggtacttccgaccaggaaggtggcatggcctctatggtttatgccggtaaaatcattaaagacctcggtctggaagatgaatataccctgctggttaccggtacggtgcaggaagaagactgcgacggtctgtgctggcagtacattattgaacaatccggcattcgcccggaatttgtggtcagtaccgaaccaaccgactgccaggtataccgtggtcagcgcggtcgtatggaaattcgtattgatgttcagggtgttagctgccacggttctgcaccagaacgcggtgataacgccattttcaaaatgggtccgattcttggcgaattacaagaactctcccaacgtctgggttatgacgaattcctcggcaaaggcaccctcaccgtttctgaaatcttcttcacatccccaagccgttgcgctgtagcagacagctgcgcagtttcaatcgaccgtcgtctgacctggggcgaaacctgggaaggcgcgctggacgaaatccgcgccctgcctgcagtacagaaagctaacgcggttgtttctatgtacaactacgaccgtccgtcctggactggcctggtttacccaaccgaatgctacttcccgacctggaaagtggaagaagatcacttcaccgttaaagcactggtgaatgcctacgaagggctgtttggcaaagcgccggttgttgataagtggaccttctcaactaacggcgtatctatcatgggccgtcacggcattccggtgatcggctttggcccgggtaaagaacctgaagcgcatgcacctaacgaaaaaacctggaaatctcacctggtgacctgtgccgcgatgtacgctgcaatcccgttaagctggctggcaacagagtaattactcttcacttattcccctccggttcgccggagggtttttggagtttgctatgcgcgtattgatcaaaaacggcactgtcgttaacgcagatggacaagccaaacaggatttgctgattgaaagcgggattgttcgccagttgggcaacaatatttcgccgcagctcccgtatgaagaaattgatgccactggctgttacgttttccctggcggcgtggatgtccatacgcatttcaatattgatgtcggcatcgcgcgcagttgtgatgatttttttaccggtacccgcgcagctgcgtgtggcggtacaacaaccattattgaccatatgggatttggcccaaacggctgtcggttacgccatcaactggaggtttatcgtggttatgccgcccataaagcggtcatcgattacagctttcacggtgtgatccagcacattaatcacgcaatcctcgacgaaatcccgatgatggtcgaggaaggactgagcagttttaaactctatttaacctatcaatacaaactcaacgatgacgaggttttgcaggcattacgccgcttgcatgaatccggcgcgctggccaccgtgcacccggaaaatgatgcggctatcgccagcaagcgggcggaatttatcgccgcagggttaaccgcgccgcgctatcatgccttgagtcgccctctggaatgcgaagcggaagccatcgcccgcatgattaacctggcacaaattgccggtaacgccccgctctatatcgtgcacctgtctaacggcttaggtctggattatctgcgtcttgcccgtgcgaatcaccagccagtctgggttgaaacctgcccacaatatctcctgttggacgaacgcagttacgatacagaagatggcatgaagttcattcttagcccaccgctgcgtaacgtacgcgagcaggacaaactgtggtgtggcatcagcgatggtgcgattgacgtggtggcaaccgatcactgcaccttctcgatggctcaacgcctgcaaatttctaaaggcgatttcagtcgctgcccaaatggcttacccggtgtggaaaaccgcatgcagttactgttttccagtggcgtgatgacgggacgtataacaccggaacgctttgttgaattaaccagcgcaatgcccgccaggttgtttggcctgtggccgcaaaaaggattattagcgcccggttccgacggcgacgtggtgattatcgacccacgtcagagccaacaaattcagcatcgccatctccacgacaacgccgactactcgccatgggagggttttacctgtcagggcgcgattgtcagaaccttatcccgtggtgaaacgattttctgtgacggcacctttacaggcaaagccgggcgaggtcgtttcctgcgacgcaaaccgtttgtccctcccgtgctctaaccactgccagggatctatacacaatcaagaatgatgagtgaggaaaaatgagtaagaaaattgttctcgccctgggcgggaatgcgctgggcgatgacctggccgggcaaatgaaagcggtaaaaattacttctcaggcaattgttgatttaattgcccagggacatgaagttatcgtcactcatggtaacgggccgcaggtgggcatgattaaccaggcctttgaagctgccgcaaaaactgaagcgcactcgccaatgctgccgatgtctgtctgtgttgcattaagccagggttatattggttacgatctacaaaacgctttaagagaagaactgctttctcggggcattaataaacctgtagcaacgctggttactcaggtcgaagtcgacgctaacgatccggcattcctcaacccgaccaagccgatcggttcgttctttaccgagcaagaagcagagcaactgacaaaacagggttacactctgaaagaagatgctggtcgcggctatcgccgtgttgttgcctcgccaaaaccggttgatatcattgaaaaagaaacggttaaagctctggtagatgcaggtcaggtggtgatcaccgttggcggtggtggtatccctgttattcgtgaaggtaaccatctgcgtggtgccagcgcggttatcgataaagactgggccagcgcccgtttagcagaaatgattgatgccgatatgctgatcattctgactgcggtagaaaaagtggccattaacttcggtaaagagaatgaacagtggctcgatcgcctgtcattaagtgatgctgaacgctttatcgaagaaggtcattttgcgaaaggttctatgctgcctaaagtggaagctgccgcctcgtttgctcgctctcgcgcaggtcgtgaagcactgattaccgtattgagcaaagcgaaagaagggattgaaggcaaaacaggaacggtgatttgtcagtaatttaaaggccgggtgggtaataccatccggccaaagattgtcaagtaagtgcgctttgttgatgccggatgcggcgcgagcgccttatccgtcctacaaaacatcgcaaattcaatagattgcaatgcacttgtaggcctgataagcgtagcgcatcaggcaatttggcgtttgtcatcagtctcaggccgggtgggtaataccatccggccattttcatttaagccacttccagcacttcttttgtcgctttcacgccctgatgcatcaacatcattaacgcctcaagtacgccgccgccaatcgcccgggctttatcagaaacgctggtgaaatcagcggtttcaccacgaggatcgatatcaccaattttaaaaccaccaaccactgccaggccgtcgttcaacaagccacgcaccatccccgtcaacggtgctttaatttcatgctcaccaatccaggcaatcacatcgccctctttcaccagatcgcctaatttcacgttggatcgcataatgcctgcagcaggagcacggatcacccgtcgggtggtatgccccataatattgccaggaacaccggtattctcctgcgcacaaccagagtaaatcacctgaccgagccagtgcccgcgatttgtttcaattaccgcatgacaatccttcccagcagtaaagcccggcccaagcgcgattgttactggtgccatatctgcccgcgttcccaaattctgtttcgccagaatagcgtccaccacgcaaagcggtttcagttcatcaagcaatgaacaggcgggatctaccatcacaggaatgaatccgcgttcggtaagtttcatcgcttccgcagagctggttgccaggcgagcagtgacgccttcgaccgtcatttcgccatcgaacacggcctgggcaaacgccacggtacaacgaatcactgtcggtttttccacttccagcatgatcactttaaaacccgcatgatacagacgtagcgccacaccactggcgatatctcccgcaccgcgaatcaccaccagctggtgtccggaaggatgagaaggtttcatcatcagcccacccggcgcgttatttttcacctgtaatatttctgccagcacgctgatggcgatctcctgcggcgtttccgcacctatgttgtaaccaacgggcgcatgtaaacgggcaatatgttcttcagccacgcctttctcacgcaattgacgcaggaaaagctgaaccttgcgacgacttgccagcaaccccaaccatgcaatgggctgttcaatgagtttgtcgagggcttcacgatcctgattattcgtggcaatcaggacaaaattatcagggcgaatatccagtgcttccactgccgcaccaaacgactcagcatggagaagcgtggttgatggtgggaatagttcaggattgaggctttcgcgataaatatcggcaacggcaatatcaaatcctaatagcgccgcactctgggctatcgcccggttgacatgccccgcgccaatcaacaccagacgtggacgcataccatggacgctgataaatactgacattgcacctccacaatctgacccgacagcatccgcaccgttacgagccatacgtccatggaataatcgcggcttacgttcctgcaatgcctgaagcgactcttcaatcaccttccgctcaaccattccgccaccaattgtaccgacgatagaaccatcggcgcgcactaacatttgtgcagaatggcggggagtcgagcctcggctatcaacaatttgcgccatcgcaaacggacaattttgctcttcgagttttgcagcctctgtgaaaatattcataccaacctcaatggatatcctttcagtaacccggaatacccgggccgctaattcacaaatctgcgcgcgattgcaggatgttcttgtatatcgcccagccagattgcctctacgtcatgttgttgcagcggttgaaggagctcgctttgtgcaatcgcattctcacattgagaaaaacggttaatgaaccagactcgccgacaaccttgcggtacgtttttaaacgccccctgagggtggcgaaccagcgcaacgagatcgctcagttgcaaggttgcatcaggtgttaacccggtaatatcagcaaactgcgaccagcgatggacattttctgtgctcactttcgcgcccaaagtatgtcctcccatcacagcaatcacgcagcaactgcttttgggtatgcaaggttcgtgctcatcaggcgcttttaacggcattccacgcgagccatctgcttcaatgagaattacgtcacactctggtcgttgcaccagtgcatcaatcgcttctggcgtaaatccctgcacttttccctggttcgctttccagctgtgaaaacaaaatgaaatgggggatgtaagagacgcatgaggaagcatggcgggatcacgacagaaaaccacgggccagtgagacgttggcataaacatatgtgtcgtcgtcgtgattaacacacgcctgccgctagcctggagcagttctgccagccaaaaaagcaagctggttttccccccagcaccaacaacagaaatcacagtgggacgtttctgcgcacctaaatcaatgactaatgccgatgggtcaactatacttttcacgagtctttatgacctctctgggataaattatccccaacttaatccatcaggaagtaacgcaattatcaggcgttattagcccctataaataatggaaccactatgtcagccatcgactgtataattaccgctgccggattatcatcaagaatggggcaatggaaaatgatgttaccctgggaacagggaacaattcttgatacaagtatcaaaaatgcgttgcagttttgtagccgaattattttagtcaccggctatcgtggtaatgaactgcacgaacgttatgcgaaccagagcaatatcactattattcacaacccagattatgcgcagggtttactaacatccgtcaaggccgcagtacccgcagtgcaaacagaacattgttttctcacccacggtgacatgccaaccctcaccatcgatatttttagaaaaatctggtcgttacgaaatgatggcgcaatactgccactccataatggcatccccggccatccgattttagtgtcaaaaccatgcctgatgcaggcaatccaacgacccaatgtcaccaatatgcgtcaggcactccttatgggagatcattattccgtcgaaatagaaaatgcagaaataattttagatattgatactccggacgactttattacagcgaaggaaaggtatactgaaatttagaaaacgtagttaaacgattgcgttcaaatatttaatccttccggcactcattatcataatgataaggaatcactgattttgagaaaagagaaaaattgataaatgggctggcaataataattttcaggagtgattttaattctcatttagcacctgtgagttcattcacaaaaagcccttaagtttcgagccgcctcacatttttttatatttcccgccaaacctggcaagagtggtgcgattgttgctctatccccctaaaccaccggatttctcaacaccggtcactcaatgatatctgtataagctaaggagagggttatgggggatattatgcgtcccattccgtttgaggaacttttgacgcgcatatttgatgaataccaacaacaacgctcaatctttggtattcccgagcaacagttttactcacctgtaaaaggtaaaactgttagcgtcttcggtgaaacctgtgccactcccgtcggccctgccgctggcccgcacacgcagctcgcgcaaaatattgtcacttcctggctgactggcggacgtttcatcgaactaaaaaccgtccaaattcttgaccgcctggagctggaaaagccctgtattgatgccgaagacgagtgctttaacaccgaatggtctaccgaatttaccctgcttaaagcctgggatgaatacctcaaagcctggtttgccctgcaccttctcgaagcgatgttccaaccttctgattccggtaaatcgttcatctttaatatgagcgtcggttacaacctcgaaggtattaagcaaccgccaatgcaacagttcatcgacaatatgatggacgcatctgaccatccgaaattcgcgcaatatcgcgatacgctgaataaattactccaggatgacgcatttttagctcgccacggattgcaggaaaaacgcgaaagcttgcaagccttacccgctcgcatccccaccagtatggtgcatggcgtcaccctctccaccatgcacggctgtcctccgcatgaaatcgaagccatttgccgctacatgctggaagaaaaagggctcaacacctttgtgaaacttaacccgaccttactgggatacgcgcgtgttcgtgagatcctcgatatctgcggtttcggttacataggcttaaaagaagagtcatttgatcacgacctcaagctgacgcaagcgctggaaatgctggaacgcctgatggcactggcaaaagaaaaatcactcggctttggcgtaaaactgactaacactctcggcaccatcaacaataaaggcgcactgcccggtgaagagatgtatatgtcaggccgtgcgctgttcccgctctccatcaatgttgcagcagttctctctcgcgcctttgacggcaaactgcccatttcttattccggtggtgccagtcagctgactatccgcgatatttttgatacaggtattcgccctattactatggcaaccgacctgctgaaacctggcggctatctgcgcttaagtgcctgcatgcgcgagctggaaggctccgacgcctggggacttgaccatgttgacgtcgaacgactgaacagactggcagcagatgcgttaaccatggaatacacccagaaacactggaagccagaagagcgtattgaagtggcagaagacctgccgctgaccgactgctacgttgccccctgtgttactgcctgcgctatcaagcaagatattccggaatacatccgtctgcttggcgaacaccgctatgccgacgcgctggaactcatctaccaacgcaacgctctgcccgccattaccggtcatatttgcgatcaccagtgccaatacaactgtacccgcctggattacgacagtgcgctgaatatccgcgaactgaaaaaagtcgcgctggaaaaaggttgggatgaatataagcaacgctggcacaaaccagccggttctggttcacgccatccggttgccgtgattggtgcaggtccggcgggtctggcagcaggttacttccttgccagagcgggccatccggttacgctgtttgaacgcgaagccaatgcgggcggcgtggtgaaaaatatcattcctcagttccgtattcctgcagagttaattcagcacgatatcgattttgttgccgctcacggcgtgaaatttgagtatggctgctcacccgatttaaccattgagcagttaaaaaatcagggcttccactatgttctgattgccaccggcactgataaaaatagcggtgtgaaactggcgggcgacaaccaaaatgtctggaaatcactccccttcctgcgtgaatacaacaagggtacagcgctcaagctgggcaaacatgtggtcgttgtcggggcgggtaacaccgcaatggactgcgctcgtgcggcgttacgcgttccaggcgtagaaaaagcaacgatcgtttaccgtcgttcactacaagagatgcccgcatggcgcgaagagtatgaagaagcgttgcacgacggcgtagagttccgtttcctgaataatccggaacgtttcgatgctgatggcaccttaaccttgcgcgttatgtcgcttggcgaaccggatgagaaaggtcgtcgtcgtccggttgaaaccaatgaaacagtaacactgcttgtagacagcctgatcaccgccattggtgaacagcaggatactgaagccctgaatgcgatgggcgtgccgctggacaaaaacggctggccagacgtcgaccataatggcgaaactcgtctgactgacgtctttatgatcggcgacgtacagcgcggaccatcctccattgtcgctgctgtcggaaccgcgcgtcgggcgaccgatgccatccttagtcgggaaaatatccgttcccaccagaacgataaatactggaacaacgtcaatccagcggaaatctatcaacgtaaaggcgatatctctatcacgctggtgaacagtgacgatcgtgacgcgtttgtcgcccaggaagccgctcgctgcctcgaatgtaactacgtttgcagcaagtgtgtggatgtctgcccgaaccgcgccaacgtctccattgcggtcccaggcttccagaaccgtttccagacgctgcacctcgacgcttactgtaacgaatgcggcaactgcgctcagttctgtccgtggaacggtaaaccgtacaaagacaaaatcaccgtcttcagcctggcgcaagactttgataacagcagcaacccaggcttccttgtggaagattgccgggtacgagtacgtctgaataaccaaagctgggtgttaaacatcgacagcaaaggtcagtttaacaacgtaccaccggagctgaacgatatgtgccgcatcatcagccatgtccaccagcatcatcattatctgctgggccgcgtggaggtgtaatcatgttgattctgaagaatgtcactgcggtacagctacacccggcaaaagtgcaggaaggcgttgatatcgccatcgaaaacgatgtgattgtcgctatcggcgatgccctgacgcaacgctaccccgacgccagcttcaaagagatgcatggccggattgtgatgccagggattgtctgctcgcacaaccatttttactcggggctttcccgcggaattatggcaaacatcgccccttgcccggatttcatctcaacgctgaaaaatctctggtggcggctcgatcgcgcccttgatgaagagtcgctctattacagcggactgatttgttccctggaagcgattaagagcggatgtacatcggttatcgatcaccatgcctctccggcgtatatcggcgggtcgctctccacattgcgcgacgcatttttaaaagttggcctgcgcgcgatgacctgttttgaaactactgaccgtaacaacggcatcaaagagttgcaggaaggtgtagaagaaaacatccgtttcgcccgtttgattgatgaggcgaagaaagcgacaagcgagccgtatctggtggaagcacatatcggtgctcacgcgccgtttaccgtgccggatgccggtctggagatgctgcgtgaagccgtgaaagccacaggccgtggtttgcatattcacgctgcggaagacctttacgacgtttcctacagtcaccactggtacggcaaagacctgctggcacgactggcgcaattcgatctcatcgacagcaaaacgctggtcgctcatgggctgtacttgtcgaaagatgacatcaccctactcaatcagcgcgatgcgttcctggtgcataacgcccgttcaaacatgaacaaccatgtcggctacaaccatcaccttagcgacatccgcaatctggcgttgggaacggacggcattggttcggacatgtttgaagagatgaaatttgccttctttaaacatcgcgatgcgggtggtccgctgtggcctgacagttttgccaaagccctgactaacggtaacgaactgatgagccgcaactttggcgcgaaatttgggcttctggaagccggttacaaagctgatttaaccatttgcgattacaactcgccgacgccgctgctggcagacaatatcgccgggcatatcgctttcggtatgggctcaggcagcgttcacagcgtgatggtcaatggtgtgatggtctatgaagaccgtcagtttaacttcgattgcgattccatttatgcacaagccagaaaagccgctgccagtatgtggcgtcggatggatgcgctggcataaatgacagatgccctcttcccgcagggaagagggttaaataaggaaagaagatgattgaacaatttttcaggcccgactctgtcgaacaggcgctggaactgaagcgccgctaccaggatgaagccgtctggttcgccgggggcagcaaactcaatgctacaccaacccgtaccgataaaaagattgccatttccttacaggatctggaactggactgggttgactgggataacggtgcactgcggattggcgcaatgtctcgcttgcagccactgcgtgatgcgcgatttattcctgcagcgctgcgtgaagccctcggttttgtttactcacgccatgttcgtaatcagtcgaccattggtggtgaaatcgccgcccgccaggaagagtcggtgctgcttcccgtcctgttggcactggatgctgaactggtttttggcaacggcgaaacgctgtcaatcgaggactacctggcctgcccatgcgatcgcctgctaaccgaaattatcattaaagatccgtatcgcacctgtgcgacccgcaaaattagccgttctcaggcaggtttaaccgtcgtgacggcagccgttgcaatgacaggccacgacggtatgcgaattgcgctggatggcgtcgccagtaaagcactgcgtctgcatgatgtcgaaaaacaaaatctggaaggcaatgcacttgaacaggctgtcgccaacgccattttcccgcaggaagatttgcggggcagcgtggcctataaacgctatatcacgggagttctggtagccgacctgtatgccgactgccaacaggctggggaggaagccgtatgatcatccactttactttaaatggcgcgcctcaggagctaaccgttaatccaggcgaaaacgtgcaaaagctgttgtttaacatgggaatgcactctgtacgcaacagtgatgatggtttcgggtttgccggttctgacgcaataatctttaacggtaatatcgttaacgcgtccttgcttattgccgcacagttagagaaggcagatattcgtaccgcagaatctctgggcaaatggaacgagttaagtctggttcaacaggcaatggttgatgttggcgtggtgcagtctggttataacgatccagctgcagctctgattatcaccgatcttctcgatcgcatcgccgcacctacccgcgaagagatcgacgacgcgctttctggtttgttcagccgcgatgctggctggcagcaatactatcaggtcattgaactggcggttgcacgtaaaaataatccgcaggccaccattgatatcgctccgactttccgtgacgacctagaagtcattggtaagcattatcctaaaactgatgccgcgaaaatggtgcaggcgaaaccctgctatgttgaagaccgcgtaacggctgacgcctgcgtcattaaaatgttacgtagcccacacgctcacgcactgattactcatctggatgtcagcaaagctgaagccttaccgggcgtcgttcacgttattactcacctgaattgcccggatatctactataccccgggtggtcagagcgcaccggaaccgtcaccgcttgaccgccgtatgttcggcaagaaaatgcgtcacgtcggcgatcgtgttgctgcggtcgtcgcagaaagtgaagaaattgcgctcgaagcactgaagctcatcgacgttgaatatgaagtgcttaagccggtaatgtcgatcgacgaagcaatggcggaagatgcgcctgtcgtgcacgatgaaccggtggtgtatgttgctggtgcgccagatactctggaagacgataacagccatgcagcccagcgcggcgagcatatgatcatcaacttcccgatcggttctcgccctcgcaaaaatatcgccgccagtattcatggtcatattggcgatatggacaaaggctttgccgatgccgatgtgatcattgagcgaacctataactcaacgcaagcgcagcagtgcccgactgaaacacatatctgctttactcgtatggacggcgatcgtctggttatccacgcctccacccaggtaccatggcacttacgccgccaggtcgcgcgcctcgtgggcatgaaacagcataaagttcatgtcattaaagagcgagttggcggcggttttggttccaaacaggacatcctgctggaagaagtgtgcgcctgggcaacctgcgtgaccgggcgtccggtactgttccgctacacccgtgaagaagagtttattgctaacacctctcgtcacgtcgcgaaagtcaccgtcaaactgggagcgaaaaaagatggtcgcctgacggcagtgaagatggatttccgcgccaacactggcccttacggcaaccactcactcaccgtaccgtgtaacggaccggcgctgtcgctgccgttatatccgtgcgataacgtcgatttccaggtcaccacctactacagcaacatttgcccaaatggtgcttatcagggttatggcgcaccgaaaggtaacttcgctatcaccatggcattagcggaactggctgaacagttacagatcgaccaactggaaattatcgaacgtaaccgggtacacgaagggcaagagctgaaaattctcggtgcaatcggtgaaggtaaagcgccgacctccgttccttccgccgccagctgtgcactggaagagatcctgcgtcaggggcgcgagatgatccaatggtcgtcaccgaaaccgcaaaatggtgactggcacatcggtcgcggcgtcgccattatcatgcagaaatcgggtatcccggatatcgatcaggctaactgcatgatcaaactggaatcggacggcacctttatcgttcattctggcggtgcggatattggtactggtctggatactgtagtgacgaaactggcagcagaagtgctgcactgcccaccgcaggacgtgcatgttatctccggtgataccgatcatgcgttgtttgataaaggcgcatatgcctcgtccggtacttgcttctcgggtaacgcggcgcgtttggcagcggaaaatctacgggagaaaattctgttccacggcgcgcaaatgttgggtgagccagtggcagatgttcaactggcaacgccgggcgtcgtgctcggcaagaaaggcgaagttagtttcggggatattgcccataaaggcgaaaccggcaccggctttggttcactggtgggaactggcagttatatcacgcctgatttcgccttcccgtatggcgcaaacttcgctgaagttgccgtcaacacgcgtacgggtgaaatccgcctggataaattctacgccttgctggactgcggtacaccggtcaatccagagttagcgttgggacaaatctacggtgccaccctgcgtgctatcggccacagtatgagcgaagagatcatttatgacgccgaaggtcacccgttaacgcgtgatttacgcagttacggcgcaccgaaaattggtgacattccgcgtgatttccgcgctgtgctggtgccgagcgacgataaagtcggcccgttcggggcgaaatcgatctcggaaatcggtgtaaatggcgcagctcc
